(19) United States
(12) Patent Application Publication
(10) Pub. No.: US 2025/0144200 A1
(43) Pub. Date: May 8, 2025

(54) INTRANASAL IMMUNOGENIC COMPOSITIONS

(71) Applicants: Novavax, Inc., Gaithersburg, MD (US); Novavax AB, Uppsala (SE)

(72) Inventors: Gale SMITH, Germantown, MD (US); Nita PATEL, Gaithersburg, MD (US); George GRIFFITH, Gaithersburg, MD (US); Karin LÖVGREN BENGTSSON, Uppsala (SE); Linda STERTMAN, Uppsala (SE)

(21) Appl. No.: 18/939,463

(22) Filed: Nov. 6, 2024

Related U.S. Application Data
(60) Provisional application No. 63/596,421, filed on Nov. 6, 2023.

(51) Int. Cl. A61K 39/215; A61K 9/00; A61K 39/00; A61K 39/145; A61K 39/155; A61K 47/02; A61K 47/26; A61P 31/14; C12N 7/00

(52) U.S. Cl. CPC A61K 39/215; A61K 9/0043; A61K 39/145; A61K 39/155; A61K 47/02; A61K 47/26; A61P 31/14; C12N 7/00; A61K 2039/543; A61K 2039/55577; A61K 2039/575; A61K 2039/70; C12N 2760/16134; C12N 2760/16234; C12N 2760/18534; C12N 2770/20034

(57) ABSTRACT

Disclosed herein are intranasal immunogenic compositions comprising viral glycoprotein nanoparticles, which are suitable for use as vaccines. The nanoparticles present antigens from pathogens surrounded to and associated with a detergent core resulting in enhanced stability and good immunogenicity. Dosages, formulations, and methods for preparing the vaccines and nanoparticles are also disclosed. Methods for using the intranasal immunogenic compositions to stimulate an immune response in a subject against a virus are also disclosed.

### RELATED APPLICATIONS

[0001] The present application claims priority to U.S. Provisional Patent Application No. 63/596,421, filed on Nov. 6, 2023, the contents of which is incorporated herein in its entirety by reference.

### DESCRIPTION OF THE TEXT FILE SUBMITTED ELECTRONICALLY

[0002] This application contains a Sequence Listing which has been submitted electronically in XML format and is hereby incorporated by reference in its entirety. Said XML copy, created on Nov. 6, 2024, is named 1450_107US1_Sequence_Listing_11_06_2024 and is 848,477 bytes in size.

### FIELD OF THE INVENTION

[0003] The present disclosure is generally related to immunogenic compositions for intranasal delivery. The immunogenic compositions contain nanoparticles comprising viral glycoproteins and optionally an adjuvant. Exemplary viral glycoproteins include SARS-COV-2 Spike(S) glycoproteins, hemagglutinin, and respiratory syncytial virus (RSV) fusion (F) glycoproteins. The nanoparticles have improved stability and enhanced epitope presentation. The disclosure also provides methods for producing the immunogenic compositions and methods of stimulating immune responses with the compositions.

### BACKGROUND OF THE INVENTION

[0004] Intranasal immunogenic compositions are highly desirable because they avoid needle-based injections and are therefore more acceptable to the consumer.

[0005] However, the development of intranasal immunogenic compositions is challenging because proteases within the nasal cavity (e.g., aminopeptidase, exopeptidases, and endopeptidases) can degrade intranasal immunogenic compositions and prevent the development of an immune response. This is particular true of subunit vaccines. Indeed, there is only one FDA approved intranasal vaccine, which is a live attenuated influenza vaccine known as FLUMIST®. FLUMIST® was taken off the market after a study showed that its efficacy was only three percent in children, providing almost no protective benefit.

[0006] There is a need in the art for the development of effective intranasal immunogenic compositions.

### SUMMARY OF THE INVENTION

[0007] Provided herein are intranasal immunogenic compositions which induce both mucosal immunity and systemic immunity against viruses. The COVID-19 experience shows that efforts to increase vaccination are essential. Needle-free vaccinations like intranasal vaccination will make individuals more willing to undergo vaccination. In developing countries, needle-free vaccinations are particularly desirable to prevent the transmission of blood-borne pathogens like HIV and hepatitis that can occur through vaccine administration with a needle.

[0008] Although intranasal administration has been long sought after, intranasal vaccines have not been successful. For example, a live attenuated influenza vaccine was approved by the FDA, but removed after a study showed that the vaccine had almost no benefit. Protein subunit vaccines are not believed to be suitable for intranasal administration because the protein subunits get degraded by proteases in the nasal cavity. Remarkably, Applicant have demonstrated that nanoparticles comprising a non-ionic detergent and a viral glycoprotein comprising a transmembrane domain, wherein the viral glycoprotein is anchored to the detergent core via the transmembrane domain of the viral glycoprotein are particularly good at inducing an immune response, even in the presence of proteases in the nasal cavity.

[0009] Provided herein are intranasal immunogenic compositions comprising: (i) a glycoprotein nanoparticle comprising a non-ionic detergent and a viral glycoprotein comprising a transmembrane domain, wherein the viral glycoprotein is anchored to the detergent core via the transmembrane domain of the viral glycoprotein; and (ii) a pharmaceutically acceptable buffer. In embodiments, the viral glycoprotein is selected from one or more of a hemagglutinin (HA) glycoprotein, a SARS-COV-2 Spike(S) glycoprotein, and a respiratory syncytial virus (RSV) fusion (F) glycoprotein. Also provided herein are prefilled syringes comprising the intranasal immunogenic compositions. Also provided herein are dry powder compositions comprising the intranasal immunogenic compositions. Also provided herein are intranasal delivery devices comprising the intranasal immunogenic compositions. Also provided herein are intranasal delivery devices comprising an aerosol comprising an intranasal immunogenic composition described herein. Also provided herein are intranasal delivery devices comprising an intranasal immunogenic composition described herein, wherein the composition is atomized. Also provided herein are methods of stimulating an immune response against SARS-COV-2, influenza, RSV, or a combination thereof in a patient comprising intranasally administering an intranasal immunogenic composition described herein. Also provided herein are methods of inducing mucosal immunity against SARS-COV-2, influenza, RSV, or a combination thereof in a patient comprising intranasally administering an intranasal immunogenic composition described herein. Also provided herein are methods of inducing production of neutralizing antibodies against SARS-COV-2, influenza, RSV, or a combination thereof in a patient comprising administering to the patient an intranasal immunogenic composition described herein. Also provided herein are methods of stimulating an immune response against SARS-COV-2, influenza, RSV, or a combination thereof in the nasal cavity of a patient, comprising administering an intranasal immunogenic composition described herein.

### BRIEF DESCRIPTION OF THE DRAWINGS

[0010] FIG. 1 shows an image of the study design of Example 3. The study compares the immune response resulting from intranasal and intramuscular boost with immunogenic compositions comprising SARS-COV-2 S glycoproteins in the presence or absence of a saponin adjuvant.

[0011] FIGS. 2A-2B shows the titer of anti-SARS-COV-2 Spike(S) glycoprotein antibodies against a SARS-COV-2 Spike glycoprotein of SEQ ID NO: 87 induced by intranasal or intramuscular boost with an immunogenic composition comprising a SARS-COV-2 Spike (“CoV S”) glycoprotein of SEQ ID NO: 274 in the presence (FIG. 2A) or absence (FIG. 2B) of a saponin adjuvant. The saponin adjuvant contained Fraction A of Quillaja Saponaria Molina and not Fraction C of Quillaja Saponaria Molina, and (ii) a second iscom particle containing Fraction C of Quillaja Saponaria Molina and not Fraction A of Quillaja Saponaria Molina. Fraction A and Fraction C accounted for 85% and 15% by weight, respectively, of the sum of the weights of fraction A of Quillaja Saponaria Molina and fraction C of Quillaja Saponaria Molina in the adjuvant.

[0012] FIGS. 3A-3B shows the titer of anti-SARS-COV-2 Spike(S) glycoprotein antibodies against the SARS-COV-2 Spike glycoprotein of the SARS-COV-2 XBB.1.5 strain induced by intranasal or intramuscular boost with an immunogenic composition comprising a SARS-COV-2 Spike (“CoV S”) glycoprotein of SEQ ID NO: 274 in the presence (FIG. 3A) or absence (FIG. 3B) of a saponin adjuvant. The saponin adjuvant contained Fraction A of Quillaja Saponaria Molina and not Fraction C of Quillaja Saponaria Molina, and (ii) a second iscom particle containing Fraction C of Quillaja Saponaria Molina and not Fraction A of Quillaja Saponaria Molina. Fraction A and Fraction C accounted for 85% and 15% by weight, respectively, of the sum of the weights of fraction A of Quillaja Saponaria Molina and fraction C of Quillaja Saponaria Molina in the adjuvant.

[0013] FIGS. 4A-4B shows the titer of anti-SARS-COV-2 Spike(S) glycoprotein antibodies against the SARS-COV-2 Spike glycoprotein of the SARS-COV-2 XBB.1.16.6 strain (SEQ ID NO: 312) induced by intranasal or intramuscular boost with an immunogenic composition comprising a SARS-COV-2 Spike (“CoV S”) glycoprotein of SEQ ID NO: 274 in the presence (FIG. 4A) or absence (FIG. 4B) of a saponin adjuvant. The saponin adjuvant contained Fraction A of Quillaja Saponaria Molina and not Fraction C of Quillaja Saponaria Molina, and (ii) a second iscom particle containing Fraction C of Quillaja Saponaria Molina and not Fraction A of Quillaja Saponaria Molina. Fraction A and Fraction C accounted for 85% and 15% by weight, respectively, of the sum of the weights of fraction A of Quillaja Saponaria Molina and fraction C of Quillaja Saponaria Molina in the adjuvant.

[0014] FIGS. 5A-5B shows the titer of anti-SARS-COV-2 Spike(S) glycoprotein antibodies against the SARS-COV-2 Spike glycoprotein of the SARS-COV-2 EG.5.1 (SEQ ID NO: 295) strain induced by intranasal or intramuscular boost with an immunogenic composition comprising a SARS-COV-2 Spike (“CoV S”) glycoprotein of SEQ ID NO: 274 in the presence (FIG. 5A) or absence (FIG. 5B) of a saponin adjuvant. The saponin adjuvant contained Fraction A of Quillaja Saponaria Molina and not Fraction C of Quillaja Saponaria Molina, and (ii) a second iscom particle containing Fraction C of Quillaja Saponaria Molina and not Fraction A of Quillaja Saponaria Molina. Fraction A and Fraction C accounted for 85% and 15% by weight, respectively, of the sum of the weights of fraction A of Quillaja Saponaria Molina and fraction C of Quillaja Saponaria Molina in the adjuvant.

[0015] FIG. 6 shows that serum collected from mice immunized with an immunogenic composition comprising a SARS-COV-2 S glycoprotein of SEQ ID NO: 222 and a saponin adjuvant neutralized a pseudovirus encoding an XBB.1.5 SARS-COV-2 S glycoprotein. The saponin adjuvant contained Fraction A of Quillaja Saponaria Molina and not Fraction C of Quillaja Saponaria Molina, and (ii) a second iscom particle containing Fraction C of Quillaja Saponaria Molina and not Fraction A of Quillaja Saponaria Molina. Fraction A and Fraction C accounted for 85% and 15% by weight, respectively, of the sum of the weights of fraction A of Quillaja Saponaria Molina and fraction C of Quillaja Saponaria Molina in the adjuvant.

[0016] FIG. 7 shows that serum collected from mice immunized with an immunogenic composition comprising a SARS-COV-2 S glycoprotein of SEQ ID NO: 222 and a saponin adjuvant neutralized a pseudovirus encoding an XBB.1.16.6 SARS-COV-2 S glycoprotein. The saponin adjuvant contained Fraction A of Quillaja Saponaria Molina and not Fraction C of Quillaja Saponaria Molina, and (ii) a second iscom particle containing Fraction C of Quillaja Saponaria Molina and not Fraction A of Quillaja Saponaria Molina. Fraction A and Fraction C accounted for 85% and 15% by weight, respectively, of the sum of the weights of fraction A of Quillaja Saponaria Molina and fraction C of Quillaja Saponaria Molina in the adjuvant.

[0017] FIG. 8 shows that serum collected from mice immunized with an immunogenic composition comprising a SARS-COV-2 S glycoprotein of SEQ ID NO: 222 and a saponin adjuvant neutralized a pseudovirus encoding an EG.5.1 SARS-COV-2 S glycoprotein. The saponin adjuvant contained Fraction A of Quillaja Saponaria Molina and not Fraction C of Quillaja Saponaria Molina, and (ii) a second iscom particle containing Fraction C of Quillaja Saponaria Molina and not Fraction A of Quillaja Saponaria Molina. Fraction A and Fraction C accounted for 85% and 15% by weight, respectively, of the sum of the weights of fraction A of Quillaja Saponaria Molina and fraction C of Quillaja Saponaria Molina in the adjuvant.

[0018] FIGS. 9A-9B shows anti-SARS-COV-2 IgA antibodies against a SARS-COV-2 Spike glycoprotein of SEQ ID NO: 87 present in the bronchoalveolar lavage (BAL) of mice immunized intranasally or intramuscularly with an immunogenic composition comprising a SARS-COV-2 S glycoprotein of SEQ ID NO: 222 in the presence (FIG. 9A) and absence of saponin adjuvant (FIG. 9B). The saponin adjuvant contained Fraction A of Quillaja Saponaria Molina and not Fraction C of Quillaja Saponaria Molina, and (ii) a second iscom particle containing Fraction C of Quillaja Saponaria Molina and not Fraction A of Quillaja Saponaria Molina. Fraction A and Fraction C accounted for 85% and 15% by weight, respectively, of the sum of the weights of fraction A of Quillaja Saponaria Molina and fraction C of Quillaja Saponaria Molina in the adjuvant.

[0019] FIGS. 9C-9D shows anti-SARS-COV-2 IgG antibodies against a SARS-COV-2 Spike glycoprotein of SEQ ID NO: 87 present in the BAL of mice immunized intranasally or intramuscularly with an immunogenic composition comprising a SARS-COV-2 S glycoprotein of SEQ ID NO: 222 in the presence (FIG. 9C) and absence of saponin adjuvant (FIG. 9D). The saponin adjuvant contained Fraction A of Quillaja Saponaria Molina and not Fraction C of Quillaja Saponaria Molina, and (ii) a second iscom particle containing Fraction C of Quillaja Saponaria Molina and not Fraction A of Quillaja Saponaria Molina. Fraction A and Fraction C accounted for 85% and 15% by weight, respectively, of the sum of the weights of fraction A of Quillaja Saponaria Molina and fraction C of Quillaja Saponaria Molina in the adjuvant.

[0020] FIGS. 10A-10B shows anti-SARS-COV-2 IgA antibodies against a SARS-COV-2 XBB.1.5 S glycoprotein present in the bronchoalveolar lavage (BAL) of mice immunized intranasally or intramuscularly with an immunogenic composition comprising a SARS-COV-2 S glycoprotein of SEQ ID NO: 222 in the presence (FIG. 10A) and absence of saponin adjuvant (FIG. 10B). The saponin adjuvant contained Fraction A of Quillaja Saponaria Molina and not Fraction C of Quillaja Saponaria Molina, and (ii) a second iscom particle containing Fraction C of Quillaja Saponaria Molina and not Fraction A of Quillaja Saponaria Molina. Fraction A and Fraction C accounted for 85% and 15% by weight, respectively, of the sum of the weights of fraction A of Quillaja Saponaria Molina and fraction C of Quillaja Saponaria Molina in the adjuvant.

[0021] FIGS. 10C-10D shows anti-SARS-COV-2 IgG antibodies against a SARS-COV-2 XBB.1.5 S glycoprotein present in the BAL of mice immunized intranasally or intramuscularly with an immunogenic composition comprising a SARS-COV-2 S glycoprotein of SEQ ID NO: 222 in the presence (FIG. 10C) and absence of saponin adjuvant (FIG. 10D). The saponin adjuvant contained Fraction A of Quillaja Saponaria Molina and not Fraction C of Quillaja Saponaria Molina, and (ii) a second iscom particle containing Fraction C of Quillaja Saponaria Molina and not Fraction A of Quillaja Saponaria Molina. Fraction A and Fraction C accounted for 85% and 15% by weight, respectively, of the sum of the weights of fraction A of Quillaja Saponaria Molina and fraction C of Quillaja Saponaria Molina in the adjuvant.

[0022] FIGS. 11A-11B shows anti-SARS-COV-2 IgA antibodies against a SARS-COV-2 EG.5.1 S glycoprotein present in the bronchoalveolar lavage (BAL) of mice immunized intranasally or intramuscularly with an immunogenic composition comprising a SARS-COV-2 S glycoprotein of SEQ ID NO: 222 in the presence (FIG. 11A) and absence of saponin adjuvant (FIG. 11B). The saponin adjuvant contained Fraction A of Quillaja Saponaria Molina and not Fraction C of Quillaja Saponaria Molina, and (ii) a second iscom particle containing Fraction C of Quillaja Saponaria Molina and not Fraction A of Quillaja Saponaria Molina. Fraction A and Fraction C accounted for 85% and 15% by weight, respectively, of the sum of the weights of fraction A of Quillaja Saponaria Molina and fraction C of Quillaja Saponaria Molina in the adjuvant.

[0023] FIGS. 11C-11D shows anti-SARS-COV-2 IgG antibodies against a SARS-COV-2 EG.5.1S glycoprotein present in the BAL of mice immunized intranasally or intramuscularly with an immunogenic composition comprising a SARS-COV-2 S glycoprotein of SEQ ID NO: 222 in the presence (FIG. 11C) and absence of saponin adjuvant (FIG. 11D). The saponin adjuvant contained Fraction A of Quillaja Saponaria Molina and not Fraction C of Quillaja Saponaria Molina, and (ii) a second iscom particle containing Fraction C of Quillaja Saponaria Molina and not Fraction A of Quillaja Saponaria Molina. Fraction A and Fraction C accounted for 85% and 15% by weight, respectively, of the sum of the weights of fraction A of Quillaja Saponaria Molina and fraction C of Quillaja Saponaria Molina in the adjuvant.

[0024] FIG. 12 shows neutralizing antibodies against a pseudovirus expressing the SARS-COV-2 S glycoprotein of XBB.1.5 that are induced by an immunogenic composition comprising a SARS-CoV-2 S glycoprotein of SEQ ID NO: 222 in the presence of saponin adjuvant. Intranasal administration induces a 19.8 fold increase in neutralizing antibodies against a pseudovirus expressing the SARS-COV-2 S glycoprotein of XBB.1.5, whereas intramuscular administration only induces a 2.12 fold increase in neutralizing antibodies against the same pseudovirus. The saponin adjuvant contained Fraction A of Quillaja Saponaria Molina and not Fraction C of Quillaja Saponaria Molina, and (ii) a second iscom particle containing Fraction C of Quillaja Saponaria Molina and not Fraction A of Quillaja Saponaria Molina. Fraction A and Fraction C accounted for 85% and 15% by weight, respectively, of the sum of the weights of fraction A of Quillaja Saponaria Molina and fraction C of Quillaja Saponaria Molina in the adjuvant.

[0025] FIG. 13 shows IFN-γ secretion from Th1 CD4+ T cells after immunization with an immunogenic composition comprising a SARS-COV-2 S glycoprotein of SEQ ID NO: 222 in the presence of saponin adjuvant. The saponin adjuvant contained Fraction A of Quillaja Saponaria Molina and not Fraction C of Quillaja Saponaria Molina, and (ii) a second iscom particle containing Fraction C of Quillaja Saponaria Molina and not Fraction A of Quillaja Saponaria Molina. Fraction A and Fraction C accounted for 85% and 15% by weight, respectively, of the sum of the weights of fraction A of Quillaja Saponaria Molina and fraction C of Quillaja Saponaria Molina in the adjuvant.

[0026] FIG. 14 shows triple positive Th1 CD4+ T cells after immunization with an immunogenic composition comprising a SARS-COV-2 S glycoprotein of SEQ ID NO: 222 in the presence of saponin adjuvant. The saponin adjuvant contained Fraction A of Quillaja Saponaria Molina and not Fraction C of Quillaja Saponaria Molina, and (ii) a second iscom particle containing Fraction C of Quillaja Saponaria Molina and not Fraction A of Quillaja Saponaria Molina. Fraction A and Fraction C accounted for 85% and 15% by weight, respectively, of the sum of the weights of fraction A of Quillaja Saponaria Molina and fraction C of Quillaja Saponaria Molina in the adjuvant.

[0027] FIG. 15 shows the percentage of germinal center B cells out of total B cells after immunization with an immunogenic composition comprising a SARS-COV-2 S glycoprotein of SEQ ID NO: 222 in the presence of saponin adjuvant. The saponin adjuvant contained Fraction A of Quillaja Saponaria Molina and not Fraction C of Quillaja Saponaria Molina, and (ii) a second iscom particle containing Fraction C of Quillaja Saponaria Molina and not Fraction A of Quillaja Saponaria Molina. Fraction A and Fraction C accounted for 85% and 15% by weight, respectively, of the sum of the weights of fraction A of Quillaja Saponaria Molina and fraction C of Quillaja Saponaria Molina in the adjuvant.

[0028] FIG. 16 shows triple positive Th1 C8+ T cells after immunization with an immunogenic composition comprising a SARS-COV-2 S glycoprotein of SEQ ID NO: 222 in the presence of saponin adjuvant. The saponin adjuvant contained Fraction A of Quillaja Saponaria Molina and not Fraction C of Quillaja Saponaria Molina, and (ii) a second iscom particle containing Fraction C of Quillaja Saponaria Molina and not Fraction A of Quillaja Saponaria Molina. Fraction A and Fraction C accounted for 85% and 15% by weight, respectively, of the sum of the weights of fraction A of Quillaja Saponaria Molina and fraction C of Quillaja Saponaria Molina in the adjuvant.

[0029] FIG. 17 provides a timeline of the experiment of Example 5. Rhesus macaques are boosted on day 447 intranasally or intramuscularly with an immunogenic composition containing a RSV

[0030] F glycoprotein and a saponin adjuvant or an immunogenic composition containing a HA glycoprotein and a SARS-COV-2 S glycoprotein.

[0031] FIG. 18 is a schematic of the experiment of Example 5. Rhesus macaques are boosted intramuscularly or intranasally with an immunogenic containing a SARS-COV-2 S glycoprotein and a saponin adjuvant.

[0032] FIG. 19A shows the primary structure of a wild-type SARS-COV-2 S polypeptide, containing a signal peptide, numbered with respect to SEQ ID NO: 1. FIG. 19B shows the primary structure of a wild-type SARS-COV-2 S polypeptide, without a signal peptide, numbered with respect to SEQ ID NO: 2.

[0033] FIGS. 20A-20B show results from of Example 4 showing bronchiole alveolar lavage anti-XBB.1.5 IgG and IgA responses to XBB.1.5 Primary and XBB.1.5 Boost intranasal vaccination.

[0034] FIGS. 21A-21B show results from of Example 4 showing bronchiole alveolar lavage anti-JN.1 IgG and IgA responses to XBB.1.5 Primary and XBB.1.5 Boost intranasal vaccination.

[0035] FIGS. 22A-22B show results from of Example 4 showing bronchiole alveolar lavage anti-XBB.1.5 IgG and IgA responses to Bivalent BA.5 Primary and XBB.1.5 Boost intranasal vaccination.

[0036] FIGS. 23A-23B show results from of Example 4 showing bronchiole alveolar lavage anti-JN.1 IgG and IgA responses to Bivalent BA.5 Primary and XBB.1.5 Boost intranasal vaccination.

[0037] FIG. 24 shows bronchiole results from of Example 4 showing alveolar lavage pseudovirus neutralization responses to Primary Two Doses of Bivalent BA.5 and XBB.1.5 intranasal vaccination.

[0038] FIG. 25 shows results from of Example 4 showing nasal wash-anti-XBB.1.5 IgA responses to XBB.1.5 Primary and XBB.1.5 Boost.

[0039] FIG. 26 shows results from of Example 4 showing nasal wash-anti-XBB.1.5 IgA responses to Bivalent BA.5 Primary and XBB.1.5 Boost.

[0040] FIGS. 27A-27B show results from of Example 4 showing Effector CD4+ T cells Th1/Th2 responses using Intracellular Cytokine Staining (ICCS) assay 21 days post primary two doses of Prototype+BA.5 (Intranasal) (5 μg rS+5 μg Matrix-M) versus XBB.1.5 (Intranasal) (5 μg rS+5 μg Matrix-M).

[0041] FIG. 28 shows results from of Example 4 showing CD4+ T cells Th1/Th2 responses in BAL using Intracellular Cytokine Staining (ICCS) assay 21 days post primary dose Prototype+BA.5 (Intranasal) (5 μg rS+5 μg Matrix-M) versus XBB.1.5 (Intranasal) (5 μg rS+5 μg Matrix-M).

[0042] FIG. 29 shows results from of Example 4 showing CD8+ T cells Th1 responses in BAL using Intracellular Cytokine Staining (ICCS) assay 21 days post primary dose Prototype+BA.5 (Intranasal) (5 μg rS+5 μg Matrix-M) versus XBB.1.5 (Intranasal) (5 μg rS+5 μg Matrix-M).

[0043] FIGS. 30A-30B show results from of Example 4 showing CD4+ T cells Th1/Th2 responses to two doses of Bivalent BA.5 Primary followed by XBB.1.5 Intramuscular Boost (1 μg rS+5 μg Matrix-M) versus Bivalent BA.5 Primary followed by XBB.1.5 Intranasal Boost (1 μg rS+5 μg Matrix-M) using Intracellular Cytokine Staining (ICCS) assay.

[0044] FIGS. 31A-31B show results from of Example 4 showing CD4+ T cells Th1/Th2 responses to two doses of Bivalent BA.5 Primary followed by XBB.1.5 Intranasal Boost (1 μg rS+5 μg Matrix-M) versus two doses of Bivalent BA.5 Primary followed by XBB.1.5 Intranasal Boost (5 μg rS+5 μg Matrix-M) using Intracellular Cytokine Staining (ICCS) assay.

[0045] FIGS. 32A-32C show results from of Example 4 showing CD4+ T cells Th1/Th2 responses to two doses of XBB.1.5 Primary followed by XBB.1.5 Intramuscular Boost (1 μg rS+5 μg Matrix-M) versus two doses of XBB.1.5 Primary followed by XBB.1.5 Intranasal Boost (1 μg rS+5 μg Matrix-M) versus two doses of XBB.1.5 Primary followed by XBB.1.5 Intranasal Boost (5 μg rS+5 μg Matrix-M) using Intracellular Cytokine Staining (ICCS) assay.

[0046] FIG. 33 shows results from of Example 4 showing Triple Th1 CD4+ T cells response two doses of Bivalent BA.5 Primary followed by XBB.1.5 Intramuscular Boost (1 μg rS) versus two doses of Bivalent BA.5 Primary followed by XBB.1.5 Intranasal Boost (1 μg rS) versus two doses of Bivalent BA.5 Primary followed by XBB.1.5 Intranasal Boost (5 μg rS) using Intracellular Cytokine Staining (ICCS) assay.

[0047] FIG. 34 shows results from of Example 4 showing Triple Th1 CD4+ T cells response two doses of XBB.1.5 Primary followed by XBB.1.5 Intramuscular Boost (1 μg rS) versus two doses of XBB.1.5 Primary followed by XBB.1.5 Intranasal Boost (1 μg rS) versus two doses of XBB.1.5 Primary followed by XBB.1.5 Intranasal Boost (5 μg rS) using Intracellular Cytokine Staining (ICCS) assay.

[0048] FIGS. 35A-35B show results from of Example 4 showing CD4+ T cells Th1/Th2 responses to intramuscular versus intranasal XBB.1.5 Boost following primary Prototype+BA.5 or XBB.1.5 using Peptide Pool Stimulation.

[0049] FIGS. 36A-36B show results from of Example 4 showing CD8+ T cells Th1 responses to intramuscular versus intranasal XBB.1.5 Boost following primary Prototype+BA.5 or XBB.1.5 using Peptide Pool Stimulation.

[0050] FIGS. 37A-37B show results from of Example 4 showing T follicular helper cells (Tfh) and germinal center B cells in response to XBB.1.5 Boost following primary Bivalent BA.5 or XBB.1.5.

[0051] FIGS. 38A-38B show results from of Example 4 showing bronchiole alveolar lavage CD4+ T cells Th1/Th2 responses to post XBB.1.5 intranasal boost following primary Bivalent BA.5 or XBB.1.5.

[0052] FIG. 39 shows results from of Example 4 showing Triple Th1 CD4+ T cells in spleen cells in response to intranasal vaccination of XBB.1.5 rS (5 μg rS+5 μg Matrix-M) at day 21, day 41 and day 56 using Intracellular Cytokine Staining (ICCS) assay.

[0053] FIG. 40 shows results from of Example 4 showing CD8+ T cells Th1 responses to Primary and Boost with XBB.1.5 (5 μg rS) by intranasal vaccination.

### DETAILED DESCRIPTION OF THE INVENTION

### A. Definitions

[0054] As used herein, and in the appended claims, the singular forms “a”, “an”, and “the” include plural referents unless the context clearly dictates otherwise. Thus, for example, reference to “a protein” can refer to one protein or to mixtures of such protein, and reference to “the method” includes reference to equivalent steps and/or methods known to those skilled in the art, and so forth.

[0055] As used herein, the term “adjuvant” refers to a compound that, when used in combination with an immunogen, augments or otherwise alters or modifies the immune response induced against the immunogen. Modification of the immune response may include intensification or broadening the specificity of either or both antibody and cellular immune responses.

[0056] As used herein, the term “about” or “approximately” when preceding a numerical value indicates the value plus or minus a range of 10%. For example, “about 100” encompasses 90 and 110.

[0057] As used herein, the terms “immunogen,” “antigen,” and “epitope” refer to substances such as proteins, including glycoproteins, and peptides that are capable of eliciting an immune response.

[0058] As used herein, an “immunogenic composition” is a composition that comprises an antigen where administration of the composition to a subject results in the development in the subject of a humoral and/or a cellular immune response to the antigen.

[0059] As used herein, a “subunit” composition, for example a vaccine, that includes one or more selected antigens but not all antigens from a pathogen. Such a composition is substantially free of intact virus or the lysate of such cells or particles and is typically prepared from at least partially purified, often substantially purified immunogenic polypeptides from the pathogen. The antigens in the subunit composition disclosed herein are typically prepared recombinantly, often using a baculovirus system.

[0060] As used herein, “substantially” refers to isolation of a substance (e.g. a compound, polynucleotide, or polypeptide) such that the substance forms the majority percent of the sample in which it is contained. For example, in a sample, a substantially purified component comprises 85%, preferably 85%-90%, more preferably at least 95%-99.5%, and most preferably at least 99% of the sample. If a component is substantially replaced the amount remaining in a sample is less than or equal to about 0.5% to about 10%, preferably less than about 0.5% to about 1.0%.

[0061] The terms “treat,” “treatment,” and “treating,” as used herein, refer to an approach for obtaining beneficial or desired results, for example, clinical results. For the purposes of this disclosure, beneficial or desired results may include inhibiting or suppressing the initiation or progression of an infection or a disease; ameliorating, or reducing the development of, symptoms of an infection or disease; or a combination thereof.

[0062] “Prevention,” as used herein, is used interchangeably with “prophylaxis” and can mean complete prevention of an infection or disease, or prevention of the development of symptoms of that infection or disease; a delay in the onset of an infection or disease or its symptoms; or a decrease in the severity of a subsequently developed infection or disease or its symptoms.

[0063] As used herein an “effective dose” or “effective amount” refers to an amount of an immunogen sufficient to induce an immune response that reduces at least one symptom of pathogen infection. An effective dose or effective amount may be determined e.g., by measuring amounts of neutralizing secretory and/or serum antibodies, e.g., by plaque neutralization, complement fixation, enzyme-linked immunosorbent (ELISA), or microneutralization assay.

[0064] As used herein, the term “vaccine” refers to an immunogenic composition, such as an immunogen derived from a pathogen, which is used to induce an immune response against the pathogen that provides protective immunity (e.g., immunity that protects a subject against infection with the pathogen and/or reduces the severity of the disease or condition caused by infection with the pathogen). The protective immune response may include formation of antibodies and/or a cell-mediated response. Depending on context, the term “vaccine” may also refer to a suspension or solution of an immunogen that is administered to a subject to produce protective immunity.

[0065] As used herein, the term “subject” includes humans and other animals. Typically, the subject is a human. For example, the subject may be an adult, a teenager, a child (2 years to 14 years of age), an infant (birth to 2 year), or a neonate (up to 2 months). In particular aspects, the subject is up to 4 months old, or up to 6 months old. In aspects, the adults are seniors about 65 years or older, or about 60 years or older. In aspects, the subject is a pregnant woman or a woman intending to become pregnant. In other aspects, subject is not a human; for example a non-human primate; for example, a baboon, a chimpanzee, a gorilla, or a macaque. In certain aspects, the subject may be a pet, such as a dog or cat. In embodiments, the subject is immunocompromised. In embodiments, the immunocompromised subject is administered a medication that causes immunosuppression. Non-limiting examples of medications that cause immunosuppression include corticosteroids (e.g., prednisone), alkylating agents (e.g., cyclophosphamide), antimetabolites (e.g., azathioprine or 6-mercaptopurine), transplant-related immunosuppressive drugs (e.g., cyclosporine, tacrolimus, sirolimus, or mycophenolate mofetil), mitoxantrone, chemotherapeutic agents, methotrexate, tumor necrosis factor (TNF)-blocking agents (e.g., etanercept, adalimumab, infliximab). In embodiments, the immunocompromised subject is infected with a virus (e.g., human immunodeficiency virus or Epstein-Barr virus). In embodiments, the virus is a respiratory virus, such as respiratory syncytial virus, influenza, parainfluenza, adenovirus, or a picornavirus. In embodiments, the immunocompromised subject has acquired immunodeficiency syndrome (AIDS). In embodiments, the immunocompromised subject is a person living with human immunodeficiency virus (HIV). In embodiments, the immunocompromised subject is immunocompromised due to a treatment regiment designed to prevent inflammation or prevent rejection of a transplant. In embodiments, the immunocompromised subject is a subject who has received a transplant. In embodiments, the immunocompromised subject has undergone radiation therapy or a splenectomy. In embodiments, the immunocompromised subject has been diagnosed with cancer, an autoimmune disease, tuberculosis, a substance use disorder (e.g., an alcohol, opioid, or cocaine use disorder), stroke or cerebrovascular disease, a solid organ or blood stem cell transplant, sickle cell disease, thalassemia, autoimmune lymphoproliferative syndrome (ALPS), autoimmune polyglandular syndrome type 1 (APS-1), B-cell expansion with NF-κB and T-cell anergy (BENTA) disease, capsase eight deficiency state (CEDS), chronic granulomatous disease (CGD), common variable immunodeficiency (CVID), congenital neutropenia syndromes, a deficiency in the cytotoxic T-lymphocyte-associated antigen 4 (CTLA-4), a DOCK8 deficiency, a GATA2 deficiency, a glycosylation disorder with immunodeficiency, a hyper-immunoglobulin E syndrome (HIES), hyper-immunoglobulin M syndrome, diabetes, type 1 diabetes, type 2 diabetes, interferon gamma deficiency, interleukin 12 deficiency, interleukin 23 deficiency, leukocyte adhesion deficiency, lipopolysaccharide-responsive beige-like anchor (LRBA) deficiency, PI3 kinase disease, PLCG2-associated antibody deficiency and immune dysregulation (PLAID), severe combined immunodeficiency (SCID), STAT3 dominant-negative disease, STAT3 gain-of-function disease, warts, hypogammaglobulinemia, infections, and myelokathexis (WHIM) syndrome, Wisckott-Aldrich syndrome (WAS), X-linked agammaglobulinemia (XLA), X-linked lymphoproliferative disease (XLP), uremia, malnutrition, or XMEN disease. In embodiments, the immunocompromised subject is a current or former cigarette smoker. In embodiments, the immunocompromised subject has a B-cell defect, T-cell defect, macrophage defect, cytokine defect, phagocyte deficiency, phagocyte dysfunction, complement deficiency or a combination thereof. In embodiments, the subject is overweight or obese. In embodiments, an overweight subject has a body mass index (BMI)≥25 kg/m2 and <30 kg/m2. In embodiments, an obese subject has a BMI that is ≥30 kg/m2. In embodiments, the subject has a mental health condition. In embodiments, the mental health condition is depression, schizophrenia, or anxiety.

[0066] As used herein, the term “pharmaceutically acceptable” means being approved by a regulatory agency of a U.S. Federal or a state government or listed in the U.S. Pharmacopeia, European Pharmacopeia or other generally recognized pharmacopeia for use in mammals, and more particularly in humans. These compositions can be useful as a vaccine and/or antigenic compositions for inducing a protective immune response in a vertebrate.

[0067] As used herein, the term “NVX-CoV2373” refers to a vaccine composition comprising the BV2373 Spike glycoprotein (SEQ ID NO: 87) and a saponin adjuvant, wherein the saponin adjuvant contains Fraction A and Fraction C iscom matrix, wherein the Fraction A ISCOM matrix is present at about 85% by weight of the saponin adjuvant, and wherein Fraction C ISCOM matrix is present at about 15% by weight of the saponin adjuvant.

[0068] As used herein, the term “modification” as it refers to a viral glycoprotein refers to mutation, deletion, or addition of one amino acid of the viral glycoprotein. The location of a modification within a SARS-COV-2 Spike(S) glycoprotein (alternatively referred to herein as a “CoV S glycoprotein”) can be determined by aligning the sequence of the polypeptide to SEQ ID NO: 1 (CoV S polypeptide containing signal peptide) or SEQ ID NO: 2 (mature CoV S polypeptide lacking a signal peptide). The location of a modification within a respiratory syncytial virus (RSV) fusion (F) glycoprotein can be determined by aligning the sequence of the polypeptide to SEQ ID NO: 330 (mature RSV F glycoprotein lacking signal peptide) or SEQ ID NO: 329 (RSV F glycoprotein containing a signal peptide).

[0069] The term SARS-COV-2 “variant”, used interchangeably herein with a “heterogeneous SARS-COV-2 strain,” refers to a SARS-COV-2 virus comprising a CoV S polypeptide having one or more modifications as compared to a SARS-COV S polypeptide having the amino acid sequence of SEQ ID NO: 2. For example, a SARS-COV-2 variant may have at least about 2, at least about 3, at least about 4, at least about 5, at least about 6, at least about 7, at least about 8, at least about 9, at least about 10, at least about 11, at least about 12, at least about 13, at least about 14, at least about 15, at least about 16, at least about 17, at least about 18, at least about 19, at least about 20, at least about 21, at least about 22, at least about 23, at least about 24, at least about 25, at least about 26, at least about 27, at least about 28, at least about 29, at least about 30, at least about 31, at least about 32, at least about 33, at least about 34, or at least about 35 modifications, as compared to a CoV S polypeptide having the amino acid sequence of SEQ ID NO: 2. For example, a SARS-CoV-2 variant may have at least one and up to 2, up to 3, up to 4, up to 5, up to 6, up to 7, up to 8, up to 9, up to 10, up to 11, up to 12, up to 13, up to 14, up to 15, up to 16, up to 17, up to 18, up to 19, up to 20, up to 21, up to 22, up to 23, up to 24, up to 25, up to 26, up to 27, up to 28, up to 29, up to 30, up to 31, up to 32, up to 33, up to 34, up to 35 modifications, up to 40 modifications, up to 45 modifications, up to 50 modifications, up to 55 modifications, up to 60 modifications, up to 65 modifications, up to 70 modifications, up to 75 modifications, up to 80 modifications, up to 85 modifications, up to 90 modifications, up to 95 modifications, or up to 100 modifications as compared to a CoV S polypeptide having the amino acid sequence of SEQ ID NO: 2. In aspects, a SARS-COV-2 variant may have between about 2 and about 35 modifications, between about 5 and about 10 modifications, between about 5 and about 20 modifications, between about 10 and about 20 modifications, between about 15 and about 25 modifications, between about 20 and 30 modifications, between about 20 and about 40 modifications, between about 25 and about 45 modifications, between about 25 and about 100 modifications, between about 25 and about 45 modifications, or between about 35 and about 100 modifications, as compared to a CoV S polypeptide having the amino acid sequence of SEQ ID NO: 2.

[0070] The term “efficacy” of an immunogenic composition or vaccine composition described herein refers to the percentage reduction of disease (e.g., COVID-19) in a group administered an immunogenic composition as compared to a group that is not administered the immunogenic composition. In embodiments, efficacy (E) is calculated using the following equation: E (%)=(1-RR)×100, where RR=relative risk of incidence rates between the group administered the immunogenic composition and the group that is not administered the immunogenic composition. In embodiments, immunogenic compositions described herein have an efficacy against a SARS-CoV-2 virus or heterogeneous SARS-COV-2 strain that is at least about 50%, at least about 55%, at least about 60%, at least about 65%, at least about 70%, at least about 75%, at least about 80%, at least about 85%, at least about 90%, at least about 91%, at least about 92%, at least about 93%, at least about 94%, at least about 95%, at least about 96%, at least about 97%, at least about 98%, at least about 99%, between about 50% and about 99%, between about 50% and about 98%, between about 60% and about 99%, between about 60% and about 98%, between about 70% and about 98%, between about 70% and about 95%, between about 70% and about 99%, between about 80% and about 99%, between about 80% and about 98%, between about 80% and about 95%, between about 85% and about 99%, between about 85% and about 98%, between about 85% and about 95%, between about 90% and about 95%, between about 90% and 98%, or between about 90% and about 99%.

[0071] The term “percent identity” in the context of two or more nucleic acid or polypeptide sequences, refers to two or more sequences or subsequences that have a specified percentage of nucleotides or amino acid residues that are the same, when compared. Unless otherwise indicated, percent identity is calculated over the entire length of the compared sequences using the tool EMBOSS Needle, which is available online at ebi.ac.uk/Tools/psa/emboss_needle/. When the percent identity of two polypeptides is compared, the following default parameters are used: Output Format=pair; Matrix=BLOSUM62; Gap Open=10; Gap Extend 0.5, End Gap Penalty=false, End Gap Open=10, End Gap Extend=0.5. When the percent identity of two nucleic acids is compared, the following default parameters are used: Output Format=pair; Matrix=DNAfull; Gap Open=10; Gap Extend 0.5, End Gap Penalty=false, End Gap Open=10, End Gap Extend=0.5.

[0072] As used herein, the terms “intranasal administration” and “nasal administration” refer to administration of an immunogenic composition described herein to the nasal cavity of a subject. In embodiments, intranasal administration is achieved using a liquid preparation (e.g., an aqueous preparation), an aerosolized preparation, or a dry powder preparation. In embodiments, the liquid preparation, aerosolized preparation, or dry powder preparation is administered via an externally propelled nasal delivery device. In embodiments, the liquid preparation, aerosolized preparation, or dry powder preparation is administered via a self-propelled (i.e., via inhalation) nasal delivery device. In embodiments, the liquid preparation, aerosolized preparation, or dry powder preparation is administered via nasal insufflation (when an immunogenic composition is blown into the nose) or nasal instillation (when an immunogenic composition is dropped into the nose). In embodiments, the liquid preparation, aerosolized preparation, or dry powder preparation is administered via a gel, cream, ointment, lotion, or paste applied to one or more nasal epithelium (e.g., olfactory epithelium or nasal respiratory epithelium). In embodiments, the immunogenic composition is applied to mucus in the nasal cavity of a subject.

[0073] As used herein, the term “non-invasive nasal delivery device” refers an instrument that is capable of delivering an immunogenic composition to the nasal cavity without piercing the epithelium of the subject. Non-limiting examples of non-invasive nasal delivery devices include propellant (e.g., a pressurized inhaler) and non-propellant (e.g., a pump-type inhaler) types of aerosol or atomizer devices, particle dispersion devices, nebulizers, and pressurized olfactory delivery devices for delivery of liquid or powder formulations.

[0074] As used herein, the term “dry powder composition” refers to a lyophilized or spray dried form of an immunogenic composition described herein. In embodiments, a dry powder composition contains less than 10%, 9%, 8%, 7%, 6%, 5%, 4%, 3%, 2%, 1%, or less residual water content.

[0075] As used herein, the term “permeability enhancer” refers to a component of an immunogenic composition formulated for intranasal administration which promotes the passage of a viral glycoprotein through the nasal epithelium.

[0076] As used herein, the terms “bedside mix,” “bedside formulations,” “bedside vaccine compositions,” “bedside vials,” “bedside vial formulations” refer to vaccine formulations that are prepared immediately prior to administration. Such vaccine formulations contain viral antigens and adjuvants that are separately stored in different containers and are administered to a subject (e.g., either administering two consecutive injections, or combining the antigens and the adjuvants into one injection prior to administration).

[0077] As used herein, the terms “co-formulation mix,” “co-formulation,” “co-formulation immunogenic compositions,” “prefilled syringes,” “pre-mix,” refer to vaccine formulations that are prepared for short to long-term storage prior to the time of administration to a subject. Such vaccine formulations contain a combination of antigens and adjuvant in the same container and prepared in advance of administration. In embodiments, formulations contain hemagglutinin and adjuvant (e.g., saponin adjuvant) and form HaSMaNs (Hemagglutinin Saponin Matrix Nanoparticles).

[0078] As used herein, the term “split-virion” refers to a virus (e.g., an influenza virus or a SARS-CoV-2 virus), which has a viral membrane that has been disrupted with a surfactant. Examples of surfactants are described throughout this disclosure. Split-virions do not undergo further purification, so they typically contain multiple viral proteins.

[0079] As used herein, the term “recombinant” as it refers to a protein (e.g. hemagglutinin) that is produced in a cell by transcription and translation of a nucleic acid that is introduced into a cell. The nucleic acid may be introduced via a vector or a virus encoding the nucleic acid.

[0080] As used herein, the term “whole influenza virus” refers to a virus that comprises all of its envelope, viral membrane, nucleocapsid, and genetic material. In embodiments, the whole influenza virus is inactivated.

[0081] As used herein, the term “inactivated virus” refers to a virus that has undergone treatment to substantially reduce or eliminate its virulence compared to the wild-type virus.

[0082] The term “bronchoalveolar lavage,” also referred to as “BAL” refers to a fluid sample retrieved from a patient's lungs. In embodiments, the BAL is retrieved during a bronchoscopy. During a bronchoscopy, a bronchoscope containing a solution (e.g., saline) is passed through the mouth or nose into the lungs. The solution is subsequently collected from the lungs.

[0083] The term “mucosal immunity” refers to the cellular and humoral immune response that occurs in mucosal membranes. In embodiments, the methods of the disclosure provided herein result in mucosal immunity in the respiratory system.

[0084] The term “atomization” refers to the generation of fine, inhalable droplets of a liquid. The typical dimensions of atomized droplets are in the range of several microns.

[0085] The term “aerosol” refers to a dispersion of solid or liquid particles in a gas phase. In embodiments, the gas phase is air.

### B. Intranasal Immunogenic Compositions

[0086] Provided herein are intranasal immunogenic compositions comprising nanoparticles comprising a viral glycoprotein. In embodiments, the immunogenic compositions are for intranasal administration. Advantageously, intranasal administration of the intranasal immunogenic compositions described herein induces mucosal immunity. The induction of mucosal immunity may result in reduction of viral transmission.

[0087] In embodiments, the viral glycoproteins are associated with a detergent core. In embodiments, the detergent core is a non-ionic detergent. In embodiments, the nanoparticles comprise viral glycoproteins assembled into multi-oligomeric glycoprotein-detergent nanoparticles with head regions projecting outward and the detergent forming a central core surrounded by the glycoprotein. In embodiments, the viral glycoproteins comprise a transmembrane domain. In embodiments, the transmembrane domain associates with the detergent.

[0088] In embodiments, the immunogenic compositions comprise multiple nanoparticles that contain different viral glycoproteins. In embodiments, the immunogenic compositions comprise from 1 to 50, from 1 to 45, from 1 to 40, from 1 to 35, from 1 to 30, from 1 to 25, from 1 to 20, from 1 to 14, from 1 to 10, from 1 to 9, from 1 to 8, from 1 to 7, from 1 to 6, from 1 to 4, from 1 to 3, or from 1 to 2 different nanoparticles. In embodiments, the viral glycoproteins are selected from one or more of an influenza hemagglutinin (HA) glycoprotein, a SARS-COV-2 S glycoprotein, and an RSV F glycoprotein.

[0089] Non-limiting examples of viral glycoproteins are described below.

SARS-COV-2 S glycoproteins (“CoV S glycoproteins”)

[0090] In embodiments, the intranasal immunogenic compositions comprise from 1 to about 50 CoV S glycoproteins. The CoV S glycoprotein is synthesized as an inactive precursor (SO) that is proteolytically cleaved at the furin cleavage site into S1 and S2 subunits which remain non-covalently linked to form prefusion trimers. The S2 domain of the CoV S glycoprotein comprises a fusion peptide (FP), two heptad repeats (HR1 and HR2), a transmembrane (TM) domain, and a cytoplasmic tail (CT). The S1 domain of the SARS-COV-2 S protein folds into four distinct domains: the N-terminal domain (NTD) and the C-terminal domain, which contains the receptor binding domain (RBD) and two subdomains SD1 and SD2. The prefusion SARS-COV-2 S protein trimers undergo a structural rearrangement from a prefusion to a postfusion conformation upon S-protein receptor binding and cleavage. In embodiments, the CoV S polypeptides are glycoproteins, due to post-translational glycosylation. The glycoproteins comprise one or more domains, including a signal peptide, an S1 subunit, an S2 subunit, a NTD, a, RBD, two subdomains (SD1 and SD2, labeled SD1/2 in FIGS. 1A-B and referred to as “SD1/2” herein), an intact or modified fusion peptide, an HR1 domain, an HR2 domain, a TM, and a CD. In embodiments, the amino acids for each domain are given in FIG. 19A (shown according to SEQ ID NO: 1), FIG. 19B (shown according to SEQ ID NO: 2). SARS-COV-2 S glycoproteins also contain a furin cleavage site.

[0091] In embodiments, each of the CoV S glycoproteins described herein contains proline at amino acid positions 973 and 974 and comprises an inactive furin cleavage site, wherein the CoV S glycoprotein is numbered according to the CoV S glycoprotein of SEQ ID NO: 2.

[0092] In embodiments, the CoV S glycoproteins described herein are expressed with an N-terminal signal peptide. In embodiments, the N-terminal signal peptide has an amino acid sequence of SEQ ID NO: 5 (MFVFLVLLPLVSS). In embodiments, the N-terminal signal peptide has an amino acid sequence of SEQ ID NO: 117 (MFVFLVLLPLVSI). In embodiments, the N-terminal signal peptide has an amino acid sequence of SEQ ID NO: 154 (MFVFFVLLPLVSS). In embodiments, the N-terminal signal peptide has an amino acid sequence of SEQ ID NO: 193 (MFGFLVLLPLVSS). In embodiments, the signal peptide may be replaced with any signal peptide that enables expression of the CoV S glycoprotein. In embodiments, one or more of the CoV S glycoprotein signal peptide amino acids may be deleted or mutated. An initiating methionine residue is maintained to initiate expression. In embodiments, the CoV S glycoproteins are encoded by a nucleic acid sequence selected from the group consisting of SEQ ID NO: 35, SEQ ID NO: 37, SEQ ID NO: 95, SEQ ID NO: 43, SEQ ID NO: 47, SEQ ID NO: 50, SEQ ID NO: 53, SEQ ID NO: 55, SEQ ID NO: 57, SEQ ID NO: 96, SEQ ID NO: 60, SEQ ID NO: 131, SEQ ID NO: 135, SEQ ID NO: 142, SEQ ID NO: 145, SEQ ID NO: 148, SEQ ID NO: 150, SEQ ID NO: 196, SEQ ID NO: 197; SEQ ID NO: 198; SEQ ID NO: 199; SEQ ID NO: 201; SEQ ID NO: 202; SEQ ID NO: 204; SEQ ID NO: 206; SEQ ID NO:N 208; SEQ ID NO: 210; SEQ ID NO: 212; SEQ ID NO: 214; and SEQ ID NO: 216. In embodiments, the N-terminal signal peptide of the CoV S glycoprotein contains a mutation at Ser-13 relative to the native CoV Spike(S) signal polypeptide (SEQ ID NO: 5). In embodiments, Ser-13 is mutated to any natural amino acid. In embodiments, Ser-13 is mutated to alanine, methionine, isoleucine, leucine, threonine, or valine. In embodiments, Ser-13 is mutated to isoleucine.

[0093] Following expression of the CoV S glycoprotein in a host cell, the N-terminal signal peptide is cleaved to provide the mature CoV glycoprotein sequence (SEQ ID NO: 87, SEQ ID NO: 89, SEQ ID NO: 106, SEQ ID NO: 112, SEQ ID NO: 113, SEQ ID NO: 114, SEQ ID NO: 115, SEQ ID NO: 132, SEQ ID NO: 144, SEQ ID NO: 151, SEQ ID NO: 153, SEQ ID NO: 156, SEQ ID NO: 158, SEQ ID NO: 174, SEQ ID NO: 175, SEQ ID NO: 176, SEQ ID NO: 181, SEQ ID NO: 182, SEQ ID NO: 183, SEQ ID NO: 184, SEQ ID NO: 186, SEQ ID NO: 188, SEQ ID NO: 190, SEQ ID NO: 192, SEQ ID NO: 195, SEQ ID NO: 217, SEQ ID NO: 218, SEQ ID NO: 219, SEQ ID NO: 220, SEQ ID NO: 221, SEQ ID NO: 222, SEQ ID NO: 223, SEQ ID NO: 224, SEQ ID NO: 225, SEQ ID NO: 226, SEQ ID NO: 227, SEQ ID NO: 228, SEQ ID NO: 233, SEQ ID NO: 234, SEQ ID NO: 235, SEQ ID NO: 236, SEQ ID NO: 260, SEQ ID NO: 261, SEQ ID NO: 262, SEQ ID NO: 263, SEQ ID NO: 264, SEQ ID NO: 274, SEQ ID NO: 276, SEQ ID NO: 278, SEQ ID NO: 280, SEQ ID NO: 284, SEQ ID NO: 288, SEQ ID NO: 292, SEQ ID NO: 296, SEQ ID NO: 300, SEQ ID NO: 304, SEQ ID NO: 308, SEQ ID NO: 312, SEQ ID NO: 316, SEQ ID NO: 320, SEQ ID NO: 324, SEQ ID NO: 328). In embodiments, the signal peptide is cleaved by host cell proteases. In aspects, the full-length protein may be isolated from the host cell and the signal peptide cleaved subsequently.

[0094] Following cleavage of the signal peptide from a CoV Spike(S) polypeptide with an amino acid sequence corresponding to any one of SEQ ID NO: 88, SEQ ID NO: 105, SEQ ID NO: 130, SEQ ID NO: 136, SEQ ID NO: 143, SEQ ID NO: 149, SEQ ID NO: 152, SEQ ID NO: 155, SEQ ID NO: 157, SEQ ID NO: 159, SEQ ID NO: 160, SEQ ID NO: 167, SEQ ID NO: 170, SEQ ID NO: 173, SEQ ID NO: 177, SEQ ID NO: 178, SEQ ID NO: 179, SEQ ID NO: 180, SEQ ID NO: 185, SEQ ID NO: 187, SEQ ID NO: 189, SEQ ID NO: 191, SEQ ID NO: 194, SEQ ID NO: 200, SEQ ID NO: 203, SEQ ID NO: 205, SEQ ID NO: 207, SEQ ID NO: 209, SEQ ID NO: 211, SEQ ID NO: 213, SEQ ID NO: 215, SEQ ID NO: 229, SEQ ID NO: 230, SEQ ID NO: 231, SEQ ID NO: 232, SEQ ID NO: 242, SEQ ID NO: 243, SEQ ID NO: 244, SEQ ID NO: 250, SEQ ID NO: 251, SEQ ID NO: 252, SEQ ID NO: 253, SEQ ID NO: 254, SEQ ID NO: 266, SEQ ID NO: 268, SEQ ID NO: 270, SEQ ID NO: 272, SEQ ID NO: 282, SEQ ID NO: 286, SEQ ID NO: 290, SEQ ID NO: 295, SEQ ID NO: 299, SEQ ID NO: 303, SEQ ID NO: 307, SEQ ID NO: 311, SEQ ID NO: 315, SEQ ID NO: 319, SEQ ID NO: 323, and SEQ ID NO: 327 during expression and purification, a mature polypeptide having an amino acid sequence selected from the group consisting of SEQ SEQ ID NO: 87, SEQ ID NO: 89, SEQ ID NO: 106, SEQ ID NO: 112, SEQ ID NO: 113, SEQ ID NO: 114, SEQ ID NO: 115, SEQ ID NO: 132, SEQ ID NO: 144, SEQ ID NO: 151, SEQ ID NO: 153, SEQ ID NO: 156, SEQ ID NO: 158, SEQ ID NO: 174, SEQ ID NO: 175, SEQ ID NO: 176, SEQ ID NO: 181, SEQ ID NO: 182, SEQ ID NO: 183, SEQ ID NO: 184, SEQ ID NO: 186, SEQ ID NO: 188, SEQ ID NO: 190, SEQ ID NO: 192, SEQ ID NO: 195, SEQ ID NO: 217, SEQ ID NO: 218, SEQ ID NO: 219, SEQ ID NO: 220, SEQ ID NO: 221, SEQ ID NO: 222, SEQ ID NO: 223, SEQ ID NO: 224, SEQ ID NO: 225, SEQ ID NO: 226, SEQ ID NO: 227, SEQ ID NO: 228, SEQ ID NO: 233, SEQ ID NO: 234, SEQ ID NO: 235, SEQ ID NO: 236, SEQ ID NO: 260, SEQ ID NO: 261, SEQ ID NO: 262, SEQ ID NO: 263, SEQ ID NO: 264, SEQ ID NO: 274, SEQ ID NO: 276, SEQ ID NO: 278, SEQ ID NO: 280, SEQ ID NO: 284, SEQ ID NO: 288, SEQ ID NO: 292, SEQ ID NO: 296, SEQ ID NO: 300, SEQ ID NO: 304, SEQ ID NO: 308, SEQ ID NO: 312, SEQ ID NO: 316, SEQ ID NO: 320, SEQ ID NO: 324, and SEQ ID NO: 328 is obtained and used to produce a CoV S nanoparticle vaccine or CoV S nanoparticles.

[0095] Advantageously, the disclosed CoV S polypeptides may have enhanced protein expression and stability relative to a native CoV Spike(S) protein.

[0096] In embodiments, the CoV S polypeptides described herein contain further modifications from a native coronavirus S protein (e.g., SEQ ID NO: 2). In embodiments, the coronavirus S proteins described herein exhibit at least 80%, at least 85%, at least 86%, at least 87%, at least 88%, at least 89%, at least 90%, at least 91%, at least 92%, at least 93%, at least 94%, at least 95%, at least 96%, at least 97%, at least 98%, at least 99% identity to a native CoV S glycoprotein. A person of skill in the art would use known techniques to calculate the percent identity of the recombinant coronavirus S protein to the native protein or to any of the CoV S glycoproteins described herein.

[0097] In embodiments, the CoV S polypeptides described herein are at least 90%, at least 91%, at least 92%, at least 93%, at least 94%, at least 95%, at least 96%, at least 97%, at least 98%, at least 99%, or at least 99.5% identical to the CoV S polypeptide having an amino acid sequence of any one of SEQ ID NO: 87, SEQ ID NO: 174, SEQ ID NO: 175, SEQ ID NO: 176, SEQ ID NOS: 181-184, SEQ ID NO: 186, SEQ ID NO: 188, SEQ ID NO: 190, SEQ ID NO: 195; SEQ ID NOS: 217-228, SEQ ID NOS: 233-236, and SEQ ID NO: 243, SEQ ID NOS 255-328. A CoV S polypeptide may have a deletion, an insertion, or mutation of up to about 1, up to about 2, up to about 3, up to about 4, up to about 5, up to about 10, up to about 15, up to about 20, up to about 25, up to about 30, up to about 35, up to about 40, up to about 45, or up to about 50 amino acids compared to the amino acid sequence of the CoV S polypeptide having an amino acid sequence of any one of SEQ ID NO: 87, SEQ ID NO: 174, SEQ ID NO: 175, SEQ ID NO: 176, SEQ ID NOS: 181-184, SEQ ID NO: 186, SEQ ID NO: 188, SEQ ID NO: 190, SEQ ID NO: 195; SEQ ID NOS: 217-228, SEQ ID NOS: 233-236, SEQ ID NO: 243, and SEQ ID NOS: 255-328. A CoV S polypeptide may have may have a deletion, an insertion, or mutation of from 1 to about 70 amino acids, from 1 to about 5 amino acids, from about 3 to about 10 amino acids, from about 5 to about 10 amino acids, from about 8 to about 12 amino acids, from about 10 to about 15 amino acids, from about 12 to about 17 amino acids, from about 15 to about 20 amino acids, from about 18 to about 23 amino acids, from about 20 to about 25 amino acids, from about 22 to about 27 amino acids, from about 25 to about 30 amino acids, from about 30 to about 35 amino acids, from about 35 to about 40 amino acids, from about 40 to about 45 amino acids, or from about 45 to about 50 amino acids, as compared to the CoV S polypeptide having an amino acid sequence of any one of SEQ ID NO: 87, SEQ ID NO: 174, SEQ ID NO: 175, SEQ ID NO: 176, SEQ ID NOS: 181-184, SEQ ID NO: 186, SEQ ID NO: 188, SEQ ID NO: 190, SEQ ID NO: 195; SEQ ID NOS: 217-228, SEQ ID NOS: 233-236, SEQ ID NO: 243, and SEQ ID NOS: 255-328. In embodiments, the CoV S polypeptides described herein comprise about 1, about 2, about 3, about 4, about 5, about 6, about 7, about 8, about 9, about 10, about 11, about 12, about 13, about 14, about 15, about 16, about 17, about 18, about 19, about 20, about 21, about 22, about 23, about 24, about 25, about 26, about 27, about 28, about 29, about 30, about 31, about 32, about 33, about 34, about 35, about 36, about 37, about 38, about 39, about 40, about 41, about 42, about 43, about 44, about 45, about 46, about 47, about 48, about 49, about 50, about 51, about 52, about 53, about 54, about 55, about 56, about 57, about 58, about 59, about 60, about 61, about 62, about 63, about 64, about 65, about 66, about 67, about 68, about 69, about 70, about 71, about 72, about 73, about 74, or about 75 deletions, insertions, or mutations compared to the coronavirus S protein having an amino acid sequence of any one of SEQ ID NO: 87, SEQ ID NO: 174, SEQ ID NO: 175, SEQ ID NO: 176, SEQ ID NOS: 181-184, SEQ ID NO: 186, SEQ ID NO: 188, SEQ ID NO: 190, SEQ ID NO: 195; SEQ ID NOS: 217-228, SEQ ID NOS: 233-236, SEQ ID NO: 243, and SEQ ID NOS: 255-328.

[0098] In embodiments, the coronavirus S polypeptide is extended at the N-terminus, the C-terminus, or both the N-terminus and the C-terminus. In aspects, the extension is a tag useful for a function, such as purification or detection. In aspects the tag contains an epitope. For example, the tag may be a polyglutamate tag, a FLAG-tag, a HA-tag, a polyHis-tag (having about 5-10 histidines) (SEQ ID NO: 101), a hexahistidine tag (SEQ ID NO: 100), an 8X-His-tag (having eight histidines) (SEQ ID NO: 102), a Myc-tag, a Glutathione-S-transferase-tag, a Green fluorescent protein-tag, Maltose binding protein-tag, a Thioredoxin-tag, or an Fc-tag. In other aspects, the extension may be an N-terminal signal peptide fused to the protein to enhance expression. While such signal peptides are often cleaved during expression in the cell, some nanoparticles may contain the antigen with an intact signal peptide. Thus, when a nanoparticle comprises an antigen, the antigen may contain an extension and thus may be a fusion protein when incorporated into nanoparticles. For the purposes of calculating identity to the sequence, extensions are not included. In embodiments, the tag is a protease cleavage site. Non-limiting examples of protease cleavage sites include the HRV3C protease cleavage site, chymotrypsin, trypsin, elastase, endopeptidase, caspase-1, caspase-2, caspase-3, caspase-4, caspase-5, caspase-6, caspase-7, caspase-8, caspase-9, caspase-10, enterokinase, factor Xa, Granzyme B, TEV protease, and thrombin. In embodiments, the protease cleavage site is an HRV3C protease cleavage site. In embodiments, the protease cleavage site comprises an amino acid sequence of SEQ ID NO: 98.

[0099] In embodiments, the CoV S glycoprotein comprises a fusion protein. In embodiments, the CoV S glycoprotein comprises an N-terminal fusion protein. In embodiments, the Cov S glycoprotein comprises a C-terminal fusion protein. In embodiments, the fusion protein encompasses a tag useful for protein expression, purification, or detection. In embodiments, the tag is a polyHis-tag (having about 5-10 histidines), a Myc-tag, a Glutathione-S-transferase-tag, a Green fluorescent protein-tag, Maltose binding protein-tag, a Thioredoxin-tag, a Strep-tag, a Twin-Strep-tag, or an Fc-tag. In embodiments, the tag is an Fc-tag. In embodiments, the Fc-tag is monomeric, dimeric, or trimeric. In embodiments, the tag is a hexahistidine tag, e.g. a polyHis-tag which contains six histidines (SEQ ID NO: 100). In embodiments, the tag is a Twin-Strep-tag with an amino acid sequence of SEQ ID NO: 99.

[0100] In embodiments, the CoV S polypeptide is a fusion protein comprising another coronavirus protein. In embodiments, the other coronavirus protein is from the same coronavirus. In embodiments, the other coronavirus protein is from a different coronavirus.

[0101] In aspects, the CoV S glycoprotein may be truncated. For example, the N-terminus may be truncated by about 10 amino acids, about 30 amino acids, about 50 amino acids, about 75 amino acids, about 100 amino acids, or about 200 amino acids. The C-terminus may be truncated instead of or in addition to the N-terminus. For example, the C-terminus may be truncated by about 10 amino acids, about 30 amino acids, about 50 amino acids, about 75 amino acids, about 100 amino acids, or about 200 amino acids. For purposes of calculating identity to the protein having truncations, identity is measured over the remaining portion of the protein.

[0102] In embodiments, the CoV S glycoproteins contain one or more modifications to the S1 subunit having an amino acid sequence of SEQ ID NO: 121.

[0103] The amino acid sequence of the S1 subunit (SEQ ID NO: 121) is shown below.

QCVNLTTRTQLPPAYTNSFTRGVYYPDKVFRSSVLHSTQDLFLPFFSNV
TWFHAIHVSGTNGTKRFDNPVLPFNDGVYFASTEKSNIIRGWIFGTTLD
SKTQSLLIVNNATNVVIKVCEFQFCNDPFLGVYYHKNNKSWMESEFRVY
SSANNCTFEYVSQPFLMDLEGKQGNFKNLREFVFKNIDGYFKIYSKHTP
INLVRDLPQGFSALEPLVDLPIGINITRFQTLLALHRSYLTPGDSSSGW
TAGAAAYYVGYLQPRTFLLKYNENGTITDAVDCALDPLSETKCTLKSFT
VEKGIYQTSNFRVQPTESIVRFPNITNLCPFGEVENATRFASVYAWNRK
RISNCVADYSVLYNSASFSTFKCYGVSPTKLNDLCFTNVYADSFVIRGD
EVRQIAPGQTGKIADYNYKLPDDFTGCVIAWNSNNLDSKVGGNYNYLYR
LFRKSNLKPFERDISTEIYQAGSTPCNGVEGFNCYFPLQSYGFQPTNGV
GYQPYRVVVLSFELLHAPATVCGPKKSTNLVKNKCVNFNFNGLTGTGVL
TESNKKFLPFQQFGRDIADTTDAVRDPQTLEILDITPCSFGGVSVITPG
TNTSNQVAVLYQDVNCTEVPVAIHADQLTPTWRVYSTGSNVFQTRAGCL
IGAEHVNNSYECDIPIGAGICASYQTQTNSPRRAR

[0104] In embodiments, the CoV S polypeptides described herein comprise an S1 subunit with at least 90%, at least 91%, at least 92%, at least 93%, at least 94%, at least 95%, at least 96%, at least 97%, at least 98%, at least 99%, at least 99.5%, or 100% identity to the S1 subunit of SEQ ID NO: 1 or SEQ ID NO: 2. The S1 subunit may have a deletion, an insertion, or mutation of up to about 1, up to about 2, up to about 3, up to about 4, up to about 5, up to about 10, up to about 15, up to about 20, up to about 25, up to about 30 amino acids, up to about 35 amino acids, up to about 40 amino acids, up to about 45 amino acids, or up to about 50 amino acids compared to the amino acid sequence of the S1 subunit of SEQ ID NO: 1 or SEQ ID NO: 2. The S1 subunit may have a deletion, an insertion, or mutation of between about 1 and about 5 amino acids, between about 3 and about 10 amino acids, between about 5 and 10 amino acids, between about 8 and 12 amino acids, between about 10 and 15 amino acids, between about 12 and 17 amino acids, between about 15 and 20 amino acids, between about 18 and 23 amino acids, between about 20 and 25 amino acids, between about 22 and about 27 amino acids, or between about 25 and 30 amino acids as compared to the S1 subunit of SEQ ID NO: 1 or SEQ ID NO: 2.

[0105] In embodiments, the S1 subunit may contain any combination of modifications shown in Table 1A.

TABLE 1A
Modifications to S1 (SEQ ID NO: 121)

| Position | Position | Position | |
|---|---|---|---|
| within | within | within | |
| SEQ ID | SEQ ID | SEQ ID | |
| NO: 1 | NO: 2 | NO: 121 | Potential Modifications |
| 14-305 | 1-292 | 1-292 | deletion of up to about 1, 2, 3, 4, 5, 10, 20, |
| | | | 30, 40, 50, 60, 70, 80, 90, 100, 110, 120, |
| | | | 130, 140, 150, 160, 170, 180, 190, 200, |
| | | | 210, 220, 230, 240, 250, 260, 270, 280, |
| | | | 290, or 292 amino acids |
| 18 | 5 | 5 | mutation to phenylalanine |
| | | | mutation to tyrosine |
| | | | mutation to tryptophan |
| 19 | 6 | 6 | mutation to arginine |
| | | | mutation to lysine |
| | | | mutation to histidine |
| | | | mutation to isoleucine |
| 20 | 7 | 7 | mutation to asparagine |
| | | | mutation to glutamine |
| | | | mutation to isoleucine |
| | | | mutation to valine |
| 24 | 11 | 11 | mutation to serine |
| | | | mutation to threonine |
| | | | deletion |
| 25 | 12 | 12 | insertion of amino acids proline-proline- |
| | | | alanine (PPA) after amino acid 25 |
| | | | deletion |
| 26 | 13 | 13 | mutation to serine |
| | | | mutation to threonine |
| | | | deletion |
| 27 | 14 | 14 | mutation to serine |
| | | | mutation to threonine |
| 52 | 39 | 39 | mutation to arginine |
| | | | mutation to lysine |
| | | | mutation to histidine |
| 64 | 51 | 51 | mutation to histidine |
| | | | mutation to lysine |
| | | | mutation to arginine |
| 66 | 53 | 53 | mutation to tryptophan |
| | | | mutation to tyrosine |
| | | | mutation to phenylalanine |
| 67 | 54 | 54 | mutation to valine |
| | | | mutation to isoleucine |
| | | | mutation to leucine |
| 69 | 56 | 56 | Deletion of amino acid |
| 70 | 57 | 57 | Deletion of amino acid |
| | | | Mutation to phenylalanine |
| | | | Mutation to tyrosine |
| | | | Mutation to tryptophan |
| 75 | 62 | 62 | Mutation to valine |
| | | | Mutation to leucine |
| | | | Mutation to isoleucine |
| 76 | 63 | 63 | Mutation to isoleucine |
| | | | Mutation to valine |
| | | | Mutation to leucine |
| 80 | 67 | 67 | mutation to alanine |
| | | | mutation to glycine |
| 83 | 70 | 70 | mutation to alanine |
| 95 | 82 | 82 | mutation to beta branched amino acid |
| | | | mutation to isoleucine |
| | | | mutation to valine |
| 138 | 125 | 125 | mutation to tyrosine |
| | | | mutation to phenylalanine |
| | | | mutation to tryptophan |
| 142 | 129 | 129 | mutation to aspartic acid |
| | | | mutation to glutamic acid |
| 143 | 130 | 130 | deletion of amino acid |
| 144 | 131 | 131 | Deletion of amino acid |
| | | | Mutation to serine |
| 145 | 132 | 132 | Deletion of amino acid |
| | | | Mutation to histidine |
| | | | Mutation to asparagine |
| | | | Mutation to glutamine |
| 146 | 133 | 133 | mutation to aromatic amino acid |
| | | | mutation to tyrosine |
| | | | mutation to phenylalanine |
| | | | mutation to tryptophan |
| | | | mutation to glutamine |
| 147 | 134 | 134 | mutation to glutamic acid |
| | | | mutation to aspartic acid |
| 152 | 139 | 139 | mutation to cysteine |
| | | | mutation to methionine |
| | | | mutation to serine |
| | | | mutation to threonine |
| | | | mutation to arginine |
| | | | mutation to lysine |
| 156 | 143 | 143 | mutation to glycine |
| | | | mutation to alanine |
| 157 | 144 | 144 | deletion of amino acid |
| | | | mutation to leucine |
| | | | mutation to isoleucine |
| | | | mutation to valine |
| | | | mutation to beta-branched amino acid |
| 158 | 145 | 145 | deletion of amino acid |
| 180 | 167 | 167 | mutation to beta-branched amino acid |
| | | | mutation to valine |
| | | | mutation to isoleucine |
| | | | mutation to leucine |
| 183 | 170 | 170 | mutation to glutamic acid |
| | | | mutation to aspartic acid |
| 190 | 177 | 177 | mutation to serine |
| | | | mutation to threonine |
| | | | mutation to cysteine |
| 210 | 197 | 197 | mutation to valine |
| | | | mutation to isoleucine |
| | | | mutation to leucine |
| | | | mutation to beta branched amino acid |
| 211 | 198 | 198 | mutation to isoleucine |
| | | | mutation to valine |
| | | | mutation to leucine |
| | | | mutation to beta branched amino acid |
| | | | deletion of amino acid |
| 212 | 199 | 199 | mutation to isoleucine |
| | | | mutation to valine |
| | | | mutation to leucine |
| | | | mutation to beta branched amino acid |
| | | | deletion of amino acid |
| 213 | 200 | 200 | mutation to valine |
| | | | mutation to leucine |
| | | | mutation to isoleucine |
| | | | mutation to beta branched amino acid |
| | | | mutation to proline |
| | | | mutation to glycine |
| | | | mutation to glutamic acid |
| | | | mutation to aspartic acid |
| 214 | 201 | 201 | mutation to arginine |
| | | | mutation to lysine |
| | | | mutation to histidine |
| | | | mutation to aspartic acid |
| | | | mutation to glutamic acid |
| | | | insertion of amino acids glutamic acid- |
| | | | proline-glutamic acid (EPE) after 214 |
| 215 | 202 | 202 | mutation to glycine |
| | | | mutation to alanine |
| | | | insertion of amino acids glutamic acid- |
| | | | proline-glutamic acid (EPE) after 215 |
| 222 | 209 | 209 | mutation to valine |
| | | | mutation to leucine |
| | | | mutation to isoleucine |
| 241-244 | 228-231 | 228-231 | deletion of 1, 2, 3, or 4 amino acids |
| 242 | 229 | 229 | mutation to histidine |
| | | | mutation to lysine |
| | | | mutation to arginine |
| 246 | 233 | 233 | mutation to beta-branched amino acid |
| | | | mutation to isoleucine |
| | | | mutation to valine |
| | | | mutation to threonine |
| | | | mutation to asparagine |
| 247 | 234 | 234 | deletion of amino acid |
| 248 | 235 | 235 | deletion of amino acid |
| 249 | 236 | 236 | deletion of amino acid |
| 250 | 237 | 237 | deletion of amino acid |
| 251 | 238 | 238 | deletion of amino acid |
| 252 | 239 | 239 | deletion of amino acid |
| | | | mutation to valine |
| | | | mutation to leucine |
| | | | mutation to isoleucine |
| | | | mutation to beta branched amino acid |
| | | | mutation to glycine |
| 253 | 240 | 240 | mutation to glycine |
| | | | deletion of amino acid |
| 257 | 244 | 244 | mutation to serine |
| | | | mutation to threonine |
| | | | mutation to asparagine |
| | | | mutation to glutamine |
| 258 | 245 | 245 | mutation to isoleucine |
| | | | mutation to valine |
| | | | mutation to leucine |
| | | | mutation to beta branched amino acid |
| 339 | 326 | 326 | mutation to aspartic acid |
| | | | mutation to glutamic acid |
| | | | mutation to histidine |
| 346 | 333 | 333 | mutation to lysine |
| | | | mutation to arginine |
| | | | mutation to histidine |
| | | | mutation to threonine |
| | | | mutation to serine |
| 368 | 355 | 355 | mutation to isoleucine |
| | | | mutation to leucine |
| | | | mutation to valine |
| | | | mutation to beta-branched amino acid |
| 371 | 358 | 358 | mutation to leucine |
| | | | mutation to isoleucine |
| | | | mutation to valine |
| | | | mutation to phenylalanine |
| 373 | 360 | 360 | mutation to proline |
| 375 | 362 | 362 | mutation to phenylalanine |
| | | | mutation to tyrosine |
| | | | mutation to tryptophan |
| 376 | 363 | 363 | mutation to alanine |
| | | | mutation to glycine |
| 405 | 392 | 392 | mutation to asparagine |
| | | | mutation to glutamine |
| 408 | 395 | 395 | mutation to serine |
| | | | mutation to threonine |
| 417 | 404 | 404 | mutation to asparagine |
| | | | mutation to threonine |
| | | | mutation to isoleucine |
| | | | mutation to valine |
| | | | mutation to serine |
| | | | mutation to glutamine |
| | | | mutation to beta-branched amino acid |
| 432 | 419 | 419 | mutation to lysine |
| | | | mutation to arginine |
| | | | mutation to histidine |
| 439 | 426 | 426 | mutation to lysine |
| | | | mutation to arginine |
| | | | mutation to histidine |
| 440 | 427 | 427 | Mutation to lysine |
| | | | Mutation to arginine |
| | | | Mutation to histidine |
| 444 | 431 | 431 | Mutation to threonine |
| | | | Mutation to serine |
| 445 | 432 | 432 | Mutation to proline |
| 446 | 433 | 433 | Mutation to serine |
| | | | Mutation to threonine |
| | | | Mutation to asparagine |
| | | | Mutation to glutamine |
| 452 | 439 | 439 | mutation to arginine |
| | | | mutation to lysine |
| | | | mutation to histidine |
| | | | mutation to glutamine |
| | | | mutation to asparagine |
| 453 | 440 | 440 | mutation to phenylalanine |
| | | | mutation to tryptophan |
| 456 | 443 | 443 | mutation to leucine |
| | | | mutation to valine |
| | | | mutation to isoleucine |
| 460 | 447 | 447 | mutation to lysine |
| | | | mutation to arginine |
| 477 | 464 | 464 | mutation to asparagine |
| | | | mutation to glutamine |
| 478 | 465 | 465 | mutation to lysine |
| | | | mutation to arginine |
| | | | mutation to histidine |
| 484 | 471 | 471 | mutation to alanine |
| | | | mutation to lysine |
| | | | mutation to arginine |
| | | | mutation to histidine |
| | | | mutation to glutamine |
| | | | mutation to asparagine |
| 486 | 473 | 473 | mutation to valine |
| | | | mutation to leucine |
| | | | mutation to isoleucine |
| | | | mutation to serine |
| | | | mutation to threonine |
| | | | mutation to proline |
| 490 | 477 | 477 | mutation to serine |
| | | | mutation to threonine |
| 493 | 480 | 480 | mutation to lysine |
| | | | mutation to arginine |
| | | | mutation to histidine |
| 494 | 481 | 481 | mutation to proline |
| 496 | 483 | 483 | mutation to serine |
| | | | mutation to threonine |
| 498 | 485 | 485 | mutation to lysine |
| | | | mutation to arginine |
| | | | mutation to histidine |
| 501 | 488 | 488 | mutation to tyrosine |
| | | | mutation to phenylalanine |
| | | | mutation to tryptophan |
| 505 | 492 | 492 | mutation to histidine |
| 521 | 508 | 508 | mutation to serine |
| | | | mutation to threonine |
| 547 | 534 | 534 | mutation to lysine |
| | | | mutation to arginine |
| | | | mutation to histidine |
| 570 | 557 | 557 | Mutation to aspartic acid |
| | | | Mutation to glutamic acid |
| 604 | 591 | 591 | Mutation to isoleucine |
| | | | Mutation to leucine |
| | | | Mutation to valine |
| | | | Mutation to beta branched amino acid |
| 613 | 600 | 600 | Mutation to histidine |
| | | | Mutation to lysine |
| | | | Mutation to arginine |
| 614 | 601 | 601 | Mutation to glycine |
| | | | Mutation to alanine |
| 639 | 626 | 626 | Mutation to valine |
| | | | Mutation to leucine |
| | | | Mutation to isoleucine |
| 655 | 642 | 642 | Mutation to tyrosine |
| | | | Mutation to phenylalanine |
| | | | Mutation to tryptophan |
| 658 | 645 | 645 | Mutation to serine |
| | | | Mutation to threonine |
| 677 | 664 | 664 | Mutation to histidine |
| 679 | 666 | 666 | Mutation to lysine |
| | | | Mutation to arginine |
| | | | Mutation to histidine |
| 681 | 668 | 668 | Mutation to histidine |
| | | | Mutation to lysine |
| | | | Mutation to arginine |
| 682-685 | 669-672 | 669-672 | inactive furin cleavage site (See |
| | | | Table 1E) |

* amino acids 14-685 of SEQ ID NO: 1 and amino acids 1-672 of SEQ ID NO: 2

[0106] In embodiments, the CoV S polypeptides contain one or more modifications to the NTD. In embodiments, the NTD has an amino acid sequence of SEQ ID NO: 118, which corresponds to amino acids 14-305 of SEQ ID NO: 1 or amino acids 1-292 of SEQ ID NO: 2.

[0107] The amino acid sequence of an NTD (SEQ ID NO: 118) is shown below.

QCVNLTTRTQLPPAYTNSFTRGVYYPDKVFRSSVLHSTQDLFLPFFSNV
TWFHAIHVSGTNGTKRFDNPVLPFNDGVYFASTEKSNIIRGWIFGTTLD
SKTQSLLIVNNATNVVIKVCEFQFCNDPFLGVYYHKNNKSWMESEFRVY
SSANNCTFEYVSQPFLMDLEGKQGNFKNLREFVFKNIDGYFKIYSKHTP
INLVRDLPQGFSALEPLVDLPIGINITRFQTLLALHRSYLTPGDSSSGW
TAGAAAYYVGYLQPRTFLLKYNENGTITDAVDCALDPLSETKCTLKS

[0108] In embodiments, the NTD has an amino acid sequence of SEQ ID NO: 45, which corresponds to amino acids 14 to 331 of SEQ ID NO: 1 or amino acids 1-318 of SEQ ID NO: 2.

[0109] The amino acid sequence of an NTD (SEQ ID NO: 45) is shown below.

QCVNLTTRTQLPPAYTNSFTRGVYYPDKVFRSSVLHSTQDLFLPFFSNV
TWFHAIHVSGTNGTKRFDNPVLPFNDGVYFASTEKSNIIRGWIFGTTLD
SKTQSLLIVNNATNVVIKVCEFQFCNDPFLGVYYHKNNKSWMESEFRVY
SSANNCTFEYVSQPFLMDLEGKQGNFKNLREFVFKNIDGYFKIYSKHTP
INLVRDLPQGFSALEPLVDLPIGINITRFQTLLALHRSYLTPGDSSSGW
TAGAAAYYVGYLQPRTFLLKYNENGTITDAVDCALDPLSETKCTLKSFT
VEKGIYQTSNFRVQPTESIVRFPN

[0110] In embodiments, the NTD and RBD overlap by up to about 1 amino acid, up to about 5 amino acids, up to about 10 amino acids, or up to about 20 amino acids.

[0111] In embodiments, an NTD as provided herein may be extended at the C-terminus by up to 5, up to 10, up to 15, up to 20, up to 25, or up to 30 amino acids.

[0112] In embodiments, the CoV S polypeptides described herein comprise a NTD with at least 95%, at least 96%, at least 97%, at least 98%, at least 99%, at least 99.5%, or 100% identity to the NTD of SEQ ID NO: 1 or SEQ ID NO: 2. The NTD may have a deletion, an insertion, or mutation of up to about 1, up to about 2, up to about 3, up to about 4, up to about 5, up to about 10, up to about 15, up to about 20, up to about 25, or up to about 30 amino acids compared to the amino acid sequence of the NTD of SEQ ID NO: 1 or SEQ ID NO: 2. The NTD may have a deletion, an insertion, or mutation of between about 1 and about 5 amino acids, between about 3 and about 10 amino acids, between about 5 and 10 amino acids, between about 8 and 12 amino acids, between about 10 and 15 amino acids, between about 12 and 17 amino acids, between about 15 and 20 amino acids, between about 18 and 23 amino acids, between about 20 and 25 amino acids, between about 22 and about 27 amino acids, or between about 25 and 30 amino acids as compared to the NTD of SEQ ID NO: 1 or SEQ ID NO: 2.

[0113] In embodiments, the CoV S polypeptides contain a deletion of one or more amino acids from the N-terminal domain (NTD) (corresponding to amino acids 1-292 of SEQ ID NO: 2. In embodiments, the CoV S polypeptides contain a deletion of up to about 10, 20, 30, 40, 50, 60, 70, 80, 90, 100, 110, 120, 130, 140, 150, 160, 170, 180, 190, 200, 210, 220, 230, 240, 250, 260, 270, 280, 290, or 292 amino acids of the NTD.

[0114] In embodiments, the CoV S polypeptides contain a deletion of one or more amino acids from the NTD (corresponding to amino acids 1-318 of SEQ ID NO: 2). In embodiments, the CoV S polypeptides contain a deletion of amino acids 1-318 of the NTD of SEQ ID NO: 2. In embodiments, deletion of the NTD enhances protein expression of the CoV Spike(S) polypeptide. In embodiments, the CoV S polypeptides which have an NTD deletion have amino acid sequences represented by SEQ ID NOS: 46, 48, 49, 51, 52, and 54. In embodiments, the CoV S polypeptides which have an NTD deletion are encoded by an isolated nucleic acid sequence selected from the group consisting of SEQ ID NO: 47, SEQ ID NO: 50, and SEQ ID NO: 53.

[0115] In embodiments, the NTD may contain any combination of modifications shown in Table 1B. The modifications are shown with respect to SEQ ID NO: 2, the mature S polypeptide sequence for reference.

TABLE 1B
Modifications to NTD (SEQ ID NO: 118)

| | | SEQ ID | |
|---|---|---|---|
| Position | SEQ | NO: 118 | |
| within | ID | or SEQ | |
| SEQ | NO: | ID | |
| ID | 2 | NO: 45 | |
| NO: 1 | residue | residue | Modifications |
| 14-305 | 1-292 | 1-292 | deletion of up to about 1, 2, 3, 4, 5, 10, |
| | | | 20, 30, 40, 50, 60, 70, 80, 90, 100, 110, |
| | | | 120, 130, 140, 150, 160, 170, 180, |
| | | | 190, 200, 210, 220, 230, 240, 250, |
| | | | 260, 270, 280, 290, or 292 amino acids |
| 18 | 5 | 5 | mutation to phenylalanine |
| | | | mutation to tyrosine |
| | | | mutation to tryptophan |
| 19 | 6 | 6 | mutation to arginine |
| | | | mutation to lysine |
| | | | mutation to histidine |
| | | | mutation to isoleucine |
| 20 | 7 | 7 | mutation to asparagine |
| | | | mutation to glutamine |
| | | | mutation to isoleucine |
| | | | mutation to valine |
| 24 | 11 | 11 | mutation to serine |
| | | | mutation to threonine |
| | | | deletion |
| 25 | 12 | 12 | insertion of amino acids proline-proline- |
| | | | alanine (PPA) after amino acid 25 |
| | | | deletion |
| 26 | 13 | 13 | mutation to serine |
| | | | mutation to threonine |
| | | | deletion |
| 27 | 14 | 14 | mutation to serine |
| | | | mutation to threonine |
| 52 | 39 | 39 | mutation to arginine |
| | | | mutation to lysine |
| | | | mutation to histidine |
| 64 | 51 | 51 | mutation to histidine |
| | | | mutation to lysine |
| | | | mutation to arginine |
| 66 | 53 | 53 | mutation to tryptophan |
| | | | mutation to tyrosine |
| | | | mutation to phenylalanine |
| 67 | 54 | 54 | mutation to valine |
| | | | mutation to isoleucine |
| | | | mutation to leucine |
| 69 | 56 | 56 | Deletion of amino acid |
| 70 | 57 | 57 | Deletion of amino acid |
| | | | Mutation to phenylalanine |
| | | | Mutation to tyrosine |
| | | | Mutation to tryptophan |
| 75 | 62 | 62 | Mutation to valine |
| | | | Mutation to leucine |
| | | | Mutation to isoleucine |
| 76 | 63 | 63 | Mutation to isoleucine |
| | | | Mutation to valine |
| | | | Mutation to leucine |
| 80 | 67 | 67 | mutation to alanine |
| | | | mutation to glycine |
| 83 | 70 | 70 | mutation to alanine |
| 95 | 82 | 82 | mutation to beta branched amino acid |
| | | | mutation to isoleucine |
| | | | mutation to valine |
| 138 | 125 | 125 | mutation to tyrosine |
| | | | mutation to phenylalanine |
| | | | mutation to tryptophan |
| 142 | 129 | 129 | mutation to aspartic acid |
| | | | mutation to glutamic acid |
| 143 | 130 | 130 | deletion of amino acid |
| 144 | 131 | 131 | Deletion of amino acid |
| | | | Mutation to serine |
| 145 | 132 | 132 | Deletion of amino acid |
| | | | Mutation to histidine |
| | | | Mutation to asparagine |
| | | | Mutation to glutamine |
| 146 | 133 | 133 | mutation to aromatic amino acid |
| | | | mutation to tyrosine |
| | | | mutation to phenylalanine |
| | | | mutation to tryptophan |
| | | | mutation to glutamine |
| | | | mutation to asparagine |
| 147 | 134 | 134 | mutation to glutamic acid |
| | | | mutation to aspartic acid |
| 152 | 139 | 139 | mutation to cysteine |
| | | | mutation to methionine |
| | | | mutation to serine |
| | | | mutation to threonine |
| | | | mutation to arginine |
| | | | mutation to lysine |
| 156 | 143 | 143 | mutation to glycine |
| | | | mutation to alanine |
| 157 | 144 | 144 | deletion of amino acid |
| | | | mutation to leucine |
| 158 | 145 | 145 | deletion of amino acid |
| 180 | 167 | 167 | mutation to isoleucine |
| | | | mutation to valine |
| | | | mutation to leucine |
| | | | mutation to beta branched amino acid |
| 183 | 170 | 170 | mutation to glutamic acid |
| | | | mutation to aspartic acid |
| 190 | 177 | 177 | mutation to serine |
| | | | mutation to threonine |
| | | | mutation to cysteine |
| 210 | 197 | 197 | mutation to valine |
| | | | mutation to isoleucine |
| | | | mutation to leucine |
| | | | mutation to beta branched amino acid |
| 211 | 198 | 198 | mutation to isoleucine |
| | | | mutation to valine |
| | | | mutation to leucine |
| | | | mutation to beta branched amino acid |
| | | | deletion of amino acid |
| 212 | 199 | 199 | mutation to isoleucine |
| | | | mutation to valine |
| | | | mutation to leucine |
| | | | mutation to beta branched amino acid |
| | | | deletion of amino acid |
| 213 | 200 | 200 | mutation to valine |
| | | | mutation to leucine |
| | | | mutation to isoleucine |
| | | | mutation to beta branched amino acid |
| | | | mutation to proline |
| | | | mutation to glycine |
| | | | mutation to glutamic acid |
| | | | mutation to aspartic acid |
| 214 | 201 | 201 | mutation to arginine |
| | | | mutation to lysine |
| | | | mutation to histidine |
| | | | mutation to aspartic acid |
| | | | mutation to glutamic acid |
| | | | insertion of amino acids glutamic acid- |
| | | | proline-glutamic acid (EPE) after 214 |
| 215 | 202 | 202 | mutation to glycine |
| | | | mutation to alanine |
| | | | insertion of amino acids glutamic acid- |
| | | | proline-glutamic acid (EPE) after 215 |
| 222 | 209 | 209 | mutation to valine |
| | | | mutation to leucine |
| | | | mutation to isoleucine |
| 241-244 | 228-231 | 228-231 | deletion of 1, 2, 3, or 4 amino acids |
| 242 | 229 | 229 | mutation to histidine |
| | | | mutation to lysine |
| | | | mutation to arginine |
| 246 | 233 | 233 | mutation to beta-branched amino acid |
| | | | mutation to isoleucine |
| | | | mutation to valine |
| | | | mutation to threonine |
| | | | mutation to asparagine |
| 247 | 234 | 234 | deletion of amino acid |
| 248 | 235 | 235 | deletion of amino acid |
| 249 | 236 | 236 | deletion of amino acid |
| 250 | 237 | 237 | deletion of amino acid |
| 251 | 238 | 238 | deletion of amino acid |
| 252 | 239 | 239 | deletion of amino acid |
| | | | mutation to valine |
| | | | mutation to isoleucine |
| | | | mutation to leucine |
| | | | mutation to beta branched amino acid |
| | | | mutation to glycine |
| 253 | 240 | 240 | mutation to glycine |
| | | | deletion of amino acid |
| 257 | 244 | 244 | mutation to serine |
| | | | mutation to threonine |
| 258 | 245 | 245 | mutation to isoleucine |
| | | | mutation to valine |
| | | | mutation to leucine |
| | | | mutation to beta branched amino acid |

* amino acids 14-305 of SEQ ID NO: 1 and amino acids 1-292 of SEQ ID NO: 2

[0116] In embodiments, the CoV S polypeptides contain one or more modifications to the RBD.

[0117] In embodiments, the RBD has an amino acid sequence of SEQ ID NO: 126, which corresponds to amino acids 331-527 of SEQ ID NO: 1 or amino acids 318-514 of SEQ ID NO: 2.

[0118] The amino acid sequence of the RBD (SEQ ID NO: 126) is shown below:

NITNLCPFGEVENATRFASVYAWNRKRISNCVADYSVLYNSASFSTFKC
YGVSPTKLNDLCFTNVYADSFVIRGDEVRQIAPGQTGKIADYNYKLPDD
FTGCVIAWNSNNLDSKVGGNYNYLYRLFRKSNLKPFERDISTEIYQAGS
TPCNGVEGENCYFPLQSYGFQPTNGVGYQPYRVVVLSFELLHAPATVCG
P

[0119] In embodiments, the RBD has an amino acid sequence of SEQ ID NO: 116, which corresponds to amino acids 335-530 of SEQ ID NO: 1 or amino acids 322-517 of SEQ ID NO: 2.

[0120] The amino acid sequence of the RBD (SEQ ID NO: 116) is shown below.

LCPFGEVENATRFASVYAWNRKRISNCVADYSVLYNSASFSTFKCYGVS
PTKLNDLCFTNVYADSFVIRGDEVRQIAPGQTGKIADYNYKLPDDFTGC
VIAWNSNNLDSKVGGNYNYLYRLFRKSNLKPFERDISTEIYQAGSTPCN
GVEGENCYFPLQSYGFQPTNGVGYQPYRVVVLSFELLHAPATVCGPKKS

[0121] In embodiments, an RBD as provided herein may be extended at the N-terminus or C-terminus by up to 1 amino acid, up to 5 amino acids, up to 10 amino acids, up to 15 amino acids, up to 20 amino acids, up to 25 amino acids, or up to 30 amino acids.

[0122] In embodiments, the CoV S polypeptides described herein comprise a RBD with at least 95%, at least 96%, at least 97%, at least 98%, at least 99%, at least 99.5%, or 100% identity to the RBD of SEQ ID NO: 1 or SEQ ID NO: 2. The RBD may have a deletion, an insertion, or mutation of up to about 1, up to about 2, up to about 3, up to about 4, up to about 5, up to about 10, up to about 15, up to about 20, up to about 25, or up to about 30 amino acids compared to the amino acid sequence of the RBD of SEQ ID NO: 1 or SEQ ID NO: 2. The RBD may have a deletion, an insertion, or mutation of from about 1 to about 50 amino acids, from about 1 to about 5 amino acids, from about 3 to about 10 amino acids, from about 5 to about 10 amino acids, from about 8 to about 12 amino acids, from about 10 to about 15 amino acids, from about 12 to about 17 amino acids, from about 15 to about 20 amino acids, from about 18 to about 23 amino acids, from about 20 to about 25 amino acids, from about 22 to about 27 amino acids, or from about 25 to about 30 amino acids as compared to the RBD of SEQ ID NO: 1 or SEQ ID NO: 2.

[0123] In embodiments, the CoV S polypeptide has at least one, at least two, at least three, at least four, at least four, at least 5, at least 6, at least 7, at least 8, at least 9, at least 10, at least 11, at least 12, at least 13, at least 14, at least 15, at least 16, at least 17, at least 18, at least 19, or at least 20 modifications in the RBD. In aspects, there are up to about 20, up to about 25, up to about 30, up to about 35, up to about 40, up to about 45, or up to about 50 modifications in the RBD. In embodiments, the RBD may contain any combination of modifications as shown in Table 1C.

TABLE 1C
Modifications to RBD (SEQ ID NO: 126)

| Position | Position | Position | |
|---|---|---|---|
| within | within | within | |
| SEQ ID | SEQ ID | SEQ ID | |
| NO: 1 | NO: 2 | NO: 126 | Potential Modifications |
| 339 | 326 | 9 | mutation to aspartic acid |
| | | | mutation to glutamic acid |
| | | | mutation to histidine |
| 346 | 333 | 16 | mutation to lysine |
| | | | mutation to arginine |
| | | | mutation to histidine |
| | | | mutation to threonine |
| | | | mutation to serine |
| 368 | 355 | 38 | mutation to isoleucine |
| | | | mutation to leucine |
| | | | mutation to valine |
| | | | mutation to beta-branched amino acid |
| 371 | 358 | 41 | mutation to leucine |
| | | | mutation to isoleucine |
| | | | mutation to valine |
| | | | mutation to phenylalanine |
| | | | mutation to tyrosine |
| | | | mutation to tryptophan |
| 373 | 360 | 43 | mutation to proline |
| 375 | 362 | 45 | mutation to phenylalanine |
| | | | mutation to tyrosine |
| | | | mutation to tryptophan |
| 376 | 363 | 46 | mutation to alanine |
| | | | mutation to glycine |
| 405 | 392 | 75 | mutation to asparagine |
| | | | mutation to glutamine |
| 408 | 395 | 78 | mutation to serine |
| | | | mutation to threonine |
| 417 | 404 | 87 | mutation to asparagine |
| | | | mutation to threonine |
| | | | mutation to isoleucine |
| | | | mutation to valine |
| | | | mutation to serine |
| | | | mutation to glutamine |
| | | | mutation to beta-branched amino acid |
| 432 | 419 | 102 | mutation to lysine |
| | | | mutation to arginine |
| | | | mutation to histidine |
| 439 | 426 | 109 | mutation to lysine |
| | | | mutation to arginine |
| | | | mutation to histidine |
| 440 | 427 | 110 | Mutation to lysine |
| | | | Mutation to arginine |
| | | | Mutation to histidine |
| 444 | 431 | 114 | Mutation to threonine |
| | | | Mutation to serine |
| 445 | 432 | 115 | Mutation to proline |
| 446 | 433 | 116 | Mutation to serine |
| | | | Mutation to threonine |
| 452 | 439 | 122 | mutation to arginine |
| | | | mutation to lysine |
| | | | mutation to histidine |
| | | | mutation to glutamine |
| | | | mutation to asparagine |
| 453 | 440 | 123 | mutation to phenylalanine |
| | | | mutation to tryptophan |
| 456 | 443 | 126 | mutation to leucine |
| | | | mutation to isoleucine |
| | | | mutation to valine |
| 460 | 447 | 130 | mutation to lysine |
| | | | mutation to arginine |
| 477 | 464 | 147 | mutation to asparagine |
| | | | mutation to glutamine |
| 478 | 465 | 148 | mutation to lysine |
| | | | mutation to arginine |
| | | | mutation to histidine |
| 484 | 471 | 154 | mutation to alanine |
| | | | mutation to lysine |
| | | | mutation to arginine |
| | | | mutation to histidine |
| | | | mutation to glutamine |
| | | | mutation to asparagine |
| 486 | 473 | 156 | mutation to valine |
| | | | mutation to leucine |
| | | | mutation to isoleucine |
| | | | mutation to serine |
| | | | mutation to threonine |
| 490 | 477 | 160 | mutation to serine |
| | | | mutation to threonine |
| 493 | 480 | 163 | mutation to lysine |
| | | | mutation to arginine |
| | | | mutation to histidine |
| 494 | 481 | 164 | mutation to proline |
| 496 | 483 | 166 | mutation to serine |
| | | | mutation to threonine |
| 498 | 485 | 168 | mutation to lysine |
| | | | mutation to arginine |
| | | | mutation to histidine |
| 501 | 488 | 171 | mutation to tyrosine |
| | | | mutation to phenylalanine |
| | | | mutation to tryptophan |
| 505 | 492 | 175 | mutation to histidine |
| 521 | 508 | 191 | mutation to serine |
| | | | mutation to threonine |

* amino acids 331-527 of SEQ ID NO: 1 and amino acids 318-514 of SEQ ID NO: 2

[0124] In embodiments, the CoV S polypeptides contain one or more modifications to the SD1/2 having an amino acid sequence of SEQ ID NO: 122, which corresponds to amino acids 542-681 of SEQ ID NO: 1 or amino acids 529-668 of SEQ ID NO: 2.

[0125] The amino acid sequence of the SD1/2 (SEQ ID NO: 122) is shown below.

NFNGLTGTGVLTESNKKFLPFQQFGRDIADTTDAVRDPQTLEILDITPC
SFGGVSVITPGTNTSNQVAVLYQDVNCTEVPVAIHADQLTPTWRVYSTG
SNVFQTRAGCLIGAEHVNNSYECDIPIGAGICASYQTQTNSP

[0126] In embodiments, the CoV S polypeptides described herein comprise a SD1/2 with at least 95%, at least 96%, at least 97%, at least 98%, at least 99%, at least 99.5%, or 100% identity to the SD1/2 of SEQ ID NO: 1 or SEQ ID NO: 2. The SD1/2 may have a deletion, an insertion, or mutation of up to about 1, up to about 2, up to about 3, up to about 4, up to about 5, up to about 10, up to about 15, up to about 20, up to about 25, or up to about 30 amino acids compared to the amino acid sequence of the SD1/2 of SEQ ID NO: 1 or SEQ ID NO: 2. The SD1/2 may have a deletion, an insertion, or mutation of between about 1 and about 5 amino acids, between about 3 and about 10 amino acids, between about 5 and 10 amino acids, between about 8 and 12 amino acids, between about 10 and 15 amino acids, between about 12 and 17 amino acids, between about 15 and 20 amino acids, between about 18 and 23 amino acids, between about 20 and 25 amino acids, between about 22 and about 27 amino acids, or between about 25 and 30 amino acids as compared to the SD1/2 of SEQ ID NO: 1 or SEQ ID NO: 2.

[0127] In embodiments, the CoV S polypeptide has at least one, at least two, at least three, at least four, at least four, at least 5, at least 6, at least 7, at least 8, at least 9, at least 10, at least 11, at least 12, at least 13, at least 14, at least 15, at least 16, at least 17, at least 18, at least 19, or at least 20 modifications in the SD1/2. In aspects, there are up to about 20, up to about 25, up to about 30, up to about 35, up to about 40, up to about 45, or up to about 50 modifications in the SD1/2. In embodiments, the SD1/2 may contain any combination of modifications as shown in Table 1D.

TABLE 1D
Modifications to SD1/2 (SEQ ID NO: 122)

| Position | Position | Position | |
|---|---|---|---|
| within | within | within | |
| SEQ | SEQ | SEQ | |
| ID | ID | ID | |
| NO: | NO: | NO: | |
| 1 | 2 | 122 | Potential Modifications |
| 547 | 534 | 6 | mutation to lysine |
| | | | mutation to arginine |
| | | | mutation to histidine |
| 570 | 557 | 29 | Mutation to aspartic acid |
| | | | Mutation to glutamic acid |
| 604 | 591 | 63 | Mutation to isoleucine |
| | | | Mutation to leucine |
| | | | Mutation to valine |
| | | | Mutation to beta-branched amino acid |
| 613 | 600 | 72 | Mutation to histidine |
| | | | Mutation to lysine |
| | | | Mutation to arginine |
| 614 | 601 | 73 | Mutation to glycine |
| | | | Mutation to alanine |
| 639 | 626 | 98 | Mutation to valine |
| | | | Mutation to leucine |
| | | | Mutation to isoleucine |
| 655 | 642 | 114 | Mutation to tyrosine |
| | | | Mutation to phenylalanine |
| | | | Mutation to tryptophan |
| 658 | 645 | 117 | Mutation to serine |
| 677 | 664 | 136 | Mutation to histidine |
| 679 | 666 | 138 | Mutation to lysine |
| | | | Mutation to arginine |
| | | | Mutation to histidine |
| 681 | 668 | 140 | Mutation to histidine |
| | | | Mutation to lysine |
| | | | Mutation to arginine |
| 547 | 534 | 6 | mutation to lysine |
| | | | mutation to arginine |
| | | | mutation to histidine |
| 570 | 557 | 29 | Mutation to aspartic acid |
| | | | Mutation to glutamic acid |
| 613 | 600 | 72 | Mutation to histidine |
| | | | Mutation to lysine |
| | | | Mutation to arginine |
| 614 | 601 | 73 | Mutation to glycine |
| | | | Mutation to alanine |
| 655 | 642 | 114 | Mutation to tyrosine |
| | | | Mutation to phenylalanine |
| | | | Mutation to tryptophan |
| 677 | 664 | 136 | Mutation to histidine |
| 679 | 666 | 138 | Mutation to lysine |
| | | | Mutation to arginine |
| | | | Mutation to histidine |

* amino acids 542-681 of SEQ ID NO: 1 or amino acids 529-668 of SEQ ID NO: 2

[0128] In embodiments, the CoV S polypeptides contain a furin site (RRAR), which corresponds to amino acids 682-685 of SEQ ID NO: 1 or amino acids 669-672 of SEQ ID NO: 2, that is inactivated by one or more mutations. Inactivation of the furin cleavage site prevents furin from cleaving the CoV S polypeptide. In embodiments, the CoV S polypeptides described herein which contain an inactivated furin cleavage site are expressed as a single chain.

[0129] In embodiments, one or more of the amino acids comprising the native furin cleavage site is mutated to any natural amino acid. In embodiments, the amino acids are L-amino acids. Non-limiting examples of amino acids include alanine, arginine, glycine, asparagine, aspartic acid, cysteine, glutamine, glutamic acid, serine, threonine, histidine, lysine, methionine, proline, valine, isoleucine, leucine, tyrosine, tryptophan, and phenylalanine.

[0130] In embodiments, one or more of the amino acids comprising the native furin cleavage site is mutated to glutamine. In embodiments, 1, 2, 3, or 4 amino acids may be mutated to glutamine. In embodiments, one of the arginines comprising the native furin cleavage site is mutated to glutamine. In embodiments, two of the arginines comprising the native furin cleavage site are mutated to glutamine. In embodiments, three of the arginines comprising the native furin cleavage site are mutated to glutamine.

[0131] In embodiments, one or more of the amino acids comprising the native furin cleavage site, is mutated to alanine. In embodiments, 1, 2, 3, or 4 amino acids may be mutated to alanine. embodiments, one of the arginines comprising the native furin cleavage site is mutated to alanine. In embodiments, two of the arginines comprising the native furin cleavage site are mutated to alanine. In embodiments, three of the arginines comprising the native furin cleavage site are mutated to alanine.

[0132] In embodiments, one or more of the amino acids comprising the native furin cleavage site is mutated to glycine. In embodiments, 1, 2, 3, or 4 amino acids may be mutated to glycine. In embodiments, one of the arginines of the native furin cleavage site is mutated to glycine. In embodiments, two of the arginines comprising the native furin cleavage site are mutated to glycine. In embodiments, three of the arginines comprising the native furin cleavage site are mutated to glycine.

[0133] In embodiments, one or more of the amino acids comprising the native furin cleavage site, is mutated to asparagine. For example 1, 2, 3, or 4 amino acids may be mutated to asparagine. In embodiments, one of the arginines comprising the native furin cleavage site is mutated to asparagine. In embodiments, two of the arginines comprising the native furin cleavage site are mutated to asparagine. In embodiments, three of the arginines comprising the native furin cleavage site are mutated to asparagine.

[0134] In embodiments, in lieu of an active furin cleavage site (SEQ ID NO: 6) the CoV S polypeptides described herein contain an inactivated furin cleavage site. In embodiments, the amino acid sequence of the inactivated furin cleavage site is represented by any one of SEQ ID NO: 7-34 or SEQ ID NO: 97. In embodiments, the amino acid sequence of the inactivated furin cleavage site is QQAQ (SEQ ID NO: 7). In embodiments, the amino acid sequence of the inactivated furin cleavage site is GSAS (SEQ ID NO: 97). In embodiments, the amino acid sequence of the inactivated furin cleavage site is GSGA (SEQ ID NO: 111). In embodiments, the amino acid sequence of the inactivated furin cleavage site is GG, GGG (SEQ ID NO: 127), GGGG (SEQ ID NO: 128), or GGGGG (SEQ ID NO: 129).

[0135] Non-limiting examples of the amino acid sequences of the inactivated furin sites contained within the CoV S polypeptides are found in Table 1E.

TABLE 1E

| Amino Acid Sequence of | Active or Inactive Furin |
|---|---|
| Furin Cleavage Site | Cleavage Site |
| RRAR (SEQ ID NO: 6) | Active |
| QQAQ (SEQ ID NO: 7) | Inactive |
| QRAR (SEQ ID NO: 8) | Inactive |
| RQAR (SEQ ID NO: 9) | Inactive |
| RRAQ (SEQ ID NO: 10) | Inactive |
| QQAR (SEQ ID NO: 11) | Inactive |
| RQAQ (SEQ ID NO: 12) | Inactive |
| QRAQ (SEQ ID NO: 13) | Inactive |
| NNAN (SEQ ID NO: 14) | Inactive |
| NRAR (SEQ ID NO: 15) | Inactive |
| RNAR (SEQ ID NO: 16) | Inactive |
| RRAN (SEQ ID NO: 17) | Inactive |
| NNAR (SEQ ID NO: 18) | Inactive |
| RNAN (SEQ ID NO: 19) | Inactive |
| NRAN (SEQ ID NO: 20) | Inactive |
| AAAA (SEQ ID NO: 21) | Inactive |
| ARAR (SEQ ID NO: 22) | Inactive |
| RAAR (SEQ ID NO: 23) | Inactive |
| RRAA (SEQ ID NO: 24) | Inactive |
| AAAR (SEQ ID NO: 25) | Inactive |
| RAAA (SEQ ID NO: 26) | Inactive |
| ARAA (SEQ ID NO: 27) | Inactive |
| GGAG (SEQ ID NO: 28) | Inactive |
| GRAR (SEQ ID NO: 29) | Inactive |
| RGAR (SEQ ID NO: 30) | Inactive |
| RRAG (SEQ ID NO: 31) | Inactive |
| GGAR (SEQ ID NO: 32) | Inactive |
| RGAG (SEQ ID NO: 33) | Inactive |
| GRAG (SEQ ID NO: 34) | Inactive |
| GSAS (SEQ ID NO: 97) | Inactive |
| GSGA (SEQ ID NO: 111) | Inactive |

[0136] In embodiments, the CoV S polypeptides contain one or more modifications to the S2 subunit having an amino acid sequence of SEQ ID NO: 120, which corresponds to amino acids 686-1273 of SEQ ID NO: 1 or amino acids 673-1260 of SEQ ID NO: 2.

[0137] The amino acid sequence of the S2 subunit (SEQ ID NO: 120) is shown below.

SVASQSIIAYTMSLGAENSVAYSNNSIAIPTNFTISVTTEILPVSMTKT
SVDCTMYICGDSTECSNLLLQYGSFCTQLNRALTGIAVEQDKNTQEVFA
QVKQIYKTPPIKDFGGFNFSQILPDPSKPSKRSFIEDLLFNKVTLADAG
FIKQYGDCLGDIAARDLICAQKFNGLTVLPPLLTDEMIAQYTSALLAGT
ITSGWTFGAGAALQIPFAMQMAYRENGIGVTQNVLYENQKLIANQFNSA
IGKIQDSLSSTASALGKLQDVVNQNAQALNTLVKQLSSNFGAISSVLND
ILSRLDKVEAEVQIDRLITGRLQSLQTYVTQQLIRAAEIRASANLAATK
MSECVLGQSKRVDFCGKGYHLMSFPQSAPHGVVFLHVTYVPAQEKNFTT
APAICHDGKAHFPREGVFVSNGTHWFVTQRNFYEPQIITTDNTFVSGNC
DVVIGIVNNTVYDPLQPELDSFKEELDKYFKNHTSPDVDLGDISGINAS
VVNIQKEIDRLNEVAKNLNESLIDLQELGKYEQYIKWPWYIWLGFIAGL
IAIVMVTIMLCCMTSCCSCLKGCCSCGSCCKFDEDDSEPVLKGVKLHYT

[0138] In embodiments, the CoV S polypeptides described herein comprise an S2 subunit with at least 95%, at least 96%, at least 97%, at least 98%, at least 99%, at least 99.5%, at least 99.7%, at least 99.9%, or 100% identity to the S2 subunit of SEQ ID NO: 1 or SEQ ID NO: 2. The S2 subunit may have a deletion, an insertion, or mutation of up to about 1, up to about 2, up to about 3, up to about 4, up to about 5, up to about 10, up to about 15, up to about 20, up to about 25, or up to about 30 amino acids compared to the amino acid sequence of the S2 subunit of SEQ ID NO: 1 or SEQ ID NO: 2. The S2 subunit may have a deletion, an insertion, or mutation of from about 1 to about 50 amino acids, from about 1 to about 5 amino acids, from about 3 to about 10 amino acids, from about 5 to 10 amino acids, from about 8 to 12 amino acids, from about 10 to 15 amino acids, from about 12 to 17 amino acids, from about 15 to 20 amino acids, from about 18 to 23 amino acids, from about 20 to 25 amino acids, from about 22 to about 27 amino acids, or from about 25 to 30 amino acids as compared to the S2 subunit of SEQ ID NO: 1 or SEQ ID NO: 2.

[0139] In embodiments, the CoV S polypeptides contain a mutation at Lys-973 of the native CoV Spike(S) polypeptide (SEQ ID NO: 2). In embodiments, Lys-973 is mutated to any natural amino acid. In embodiments, Lys-973 is mutated to proline. In embodiments, Lys-973 is mutated to glycine. In embodiments, the CoV S polypeptides containing a mutation at amino acid 973 are selected from the group consisting of SEQ ID NO: 84-89, 105-106, and 109-110.

[0140] In embodiments, the CoV S polypeptides contain a mutation at Val-974 of the native CoV Spike(S) polypeptide (SEQ ID NO: 2). In embodiments, Val-974 is mutated to any natural amino acid. In embodiments, Val-974 is mutated to proline. In embodiments, Val-974 is mutated to glycine. In embodiments, the CoV S polypeptides containing a mutation at amino acid 974 are selected from the group consisting of SEQ ID NO: 84-89, 105-106, and 109-110.

[0141] In embodiments, the CoV S polypeptides contain a mutation at Lys-973 and Val-974 of the native CoV Spike(S) polypeptide (SEQ ID NO: 2). In embodiments, Lys-973 and Val-974 are mutated to any natural amino acid. In embodiments, Lys-973 and Val-974 are mutated to proline. In embodiments, the CoV S polypeptides containing a mutation at amino acids 973 and 974 are selected from SEQ ID NOS: 84-89, 105-106, 109-110, 175, 220, and 217-228.

[0142] In embodiments, the S2 subunit may contain any combination of modifications as shown in Table 1F.

TABLE 1F
Modifications to S2 (SEQ ID NO: 120)

| Position | Position | Position | |
|---|---|---|---|
| within | within | within | |
| SEQ | SEQ | SEQ | |
| ID | ID | ID NO: | |
| NO: 1 | NO: 2 | 120 | Possible Modifications |
| 689-698 | 676-685 | 4-13 | Deletion of up to about 1, up to about 2, |
| | | | up to about 3, up to about 4, up to about |
| | | | 5, up to about 6, up to about 7, up to |
| | | | about 8, up to about 9, or up to |
| | | | about 10 amino acids |
| 701 | 688 | 16 | Mutation to beta-branched amino acid |
| | | | Mutation to valine |
| | | | Mutation to isoleucine |
| | | | Mutation to threonine |
| 704 | 691 | 19 | Mutation to leucine |
| | | | Mutation to isoleucine |
| | | | Mutation to valine |
| 715-724 | 702-711 | 30-39 | Deletion of up to about 1, up to about 2, |
| | | | up to about 3, up to about 4, up to about |
| | | | 5, up to about 6, up to about 7, up to |
| | | | about 8, up to about 9, or up to about |
| | | | 10 amino acids |
| 716 | 703 | 31 | Mutation to beta-branched amino acid |
| | | | Mutation to valine |
| | | | Mutation to isoleucine |
| 764 | 751 | 79 | Mutation to lysine |
| | | | Mutation to arginine |
| | | | Mutation to histidine |
| 788-806 | 775-793 | 103-121 | Deletion of up to about 1, up to about 2, |
| | | | up to about 3, up to about 4, up to about |
| | | | 5, up to about 6, up to about 7, up to |
| | | | about 8, up to about 9, up to about 10, |
| | | | up to about 11, up to about 12, up to |
| | | | about 13, up to about 14, up to about |
| | | | 15, up to about 16, up to about 17, up to |
| | | | about 18, or up to about 19 amino acids |
| 796 | 783 | 111 | Mutation to tyrosine |
| | | | Mutation to phenylalanine |
| | | | Mutation to tryptophan |
| 819-828 | 806-815 | 134-143 | Deletion of up to about 1, up to about 2, |
| | | | up to about 3, up to about 4, up to about |
| | | | 5, up to about 6, up to about 7, up to |
| | | | about 8, up to about 9, or up to about |
| | | | 10 amino acids |
| 856 | 843 | 171 | Mutation to lysine |
| | | | Mutation to arginine |
| | | | Mutation to histidine |
| 859 | 846 | 174 | Mutation to asparagine |
| | | | Mutation to glutamine |
| 888 | 875 | 203 | Mutation to leucine |
| | | | Mutation to isoleucine |
| | | | Mutation to valine |
| 950 | 937 | 265 | Mutation to asparagine |
| | | | Mutation to glutamine |
| 954 | 941 | 269 | Mutation to histidine |
| | | | Mutation to lysine |
| | | | Mutation to arginine |
| 969 | 956 | 284 | Mutation to lysine |
| | | | Mutation to arginine |
| | | | Mutation to histidine |
| 981 | 968 | 296 | Mutation to phenylalanine |
| | | | Mutation to tyrosine |
| | | | Mutation to tryptophan |
| 982 | 969 | 297 | Mutation to alanine |
| | | | Mutation to glycine |
| | | | Mutation to threonine |
| 986 | 973 | 301 | Mutation to proline |
| | | | Mutation to glycine |
| 987 | 974 | 302 | Mutation to proline |
| | | | Mutation to glycine |
| 1027 | 1014 | 342 | Mutation to isoleucine |
| | | | Mutation to valine |
| | | | Mutation to serine |
| 1071 | 1058 | 386 | Mutation to histidine |
| | | | Mutation to arginine |
| | | | Mutation to lysine |
| 1118 | 1105 | 433 | Mutation to histidine |
| | | | Mutation to lysine |
| | | | Mutation to arginine |
| | | | Mutation to asparagine |
| | | | Mutation to glutamine |
| 1176 | 1163 | 491 | Mutation to phenylalanine |
| | | | Mutation to tyrosine |
| | | | Mutation to tryptophan |
| 1199 | 1186 | 514 | Mutation to asparagine |
| | | | Mutation to glutamine |
| 1214- | 1201- | 1-24 | Deletion of one or more amino acids |
| 1237 | 1224 | | of TM |
| 1238- | 1225- | 1-36 | Deletion of one or more amino acids |
| 1273 | 1260 | | of CD |

* amino acids 686-1273 of SEQ ID NO: 1 and amino acids 673-1260 of SEQ ID NO: 2

[0143] In embodiments, the intranasal immunogenic compositions comprise 1, 2, 3, 4, about 5, about 6, about 7, about 8, about 9, about 10, about 11, about 12, about 13, about 14, about 15, about 16, about 17, about 18, about 19, about 20, about 21, about 22, about 23, about 24, about 25, about 26, about 27, about 28, about 29, about 30, about 31, about 32, about 33, about 34, about 35, about 36, about 37, about 38, about 39, about 40, about 41, about 42, about 43, about 44, about 45, about 46, about 47, about 48, about 49, or about 50 SARS-COV-2 S glycoproteins, including all values and ranges therebetween.

[0144] Multiple examples of SARS-COV-2 S glycoproteins are described in the following patent documents, which are each incorporated by reference herein in their entirety for all purposes: International Publication No. 2021/015220, International Publication No. 2022/020974, International Publication No. 2022/235662, International Publication No. 2023/102448.

### Influenza Glycoproteins

[0145] In embodiments, the intranasal immunogenic compositions comprise from 1 to about 50 influenza glycoproteins (e.g., hemagglutinin and/or neuraminidase). In embodiments, the intranasal immunogenic compositions comprise 1, 2, 3, 4, about 5, about 6, about 7, about 8, about 9, about 10, about 11, about 12, about 13, about 14, about 15, about 16, about 17, about 18, about 19, about 20, about 21, about 22, about 23, about 24, about 25, about 26, about 27, about 28, about 29, about 30, about 31, about 32, about 33, about 34, about 35, about 36, about 37, about 38, about 39, about 40, about 41, about 42, about 43, about 44, about 45, about 46, about 47, about 48, about 49, or about 50 influenza glycoproteins, including all values and ranges therebetween.

[0146] Multiple examples of influenza HA glycoproteins are described in the following patent documents, which are each incorporated by reference herein in their entirety for all purposes: International Publication No. 2017/041100 and International Publication No. 2019/022930.

[0147] In embodiments, an immunogenic composition of the disclosure comprises at least three HA glycoproteins or at least four HA glycoproteins. In embodiments, an immunogenic composition of the disclosure comprises three or four HA glycoproteins. In embodiments, each of the HA glycoproteins are from a different influenza strain. In embodiments, three HA glycoproteins are from a Type A influenza strain, and one HA glycoprotein is from a Type B influenza strain. In embodiments, two HA glycoproteins are from a Type A influenza strain, and two HA glycoproteins are from a Type B influenza strain. In embodiments, two HA glycoproteins are from a Type A influenza strain, and one HA glycoprotein is from a Type B influenza strain.

[0148] In embodiments, each of the at least three HA glycoproteins is isolated separately using an egg-based manufacturing process. In embodiments, an egg-based manufacturing process comprises (a) propagating an influenza virus in an egg and (b) harvesting the influenza virus.

[0149] In embodiments, the influenza virus is a live virus. In embodiments, the influenza virus is a weakened or “attenuated” virus. In embodiments, the influenza virus is optimized to grow in an egg. In embodiments, the optimized influenza virus lacks the polybasic cleavage site of hemagglutinin. The following article describes the development of an optimized influenza virus (referred to as a “candidate vaccine virus”) in detail and is incorporated by reference herein in its entirety: Belser et al. Virology. 2017 November; 511:135-141.

[0150] In embodiments, the egg is a chicken egg. In embodiments, the chicken egg is an embryonated chicken egg. In embodiments, the egg is a pathogen-free egg. In embodiments, an influenza virus is propagated by inoculating the virus in the allantoic cavity of an embryonated chicken egg. The following article describes an exemplary inoculation method and is incorporated by reference herein in its entirety: Brauer et al. J Vis Exp. 2015; (97): 52421.

[0151] In embodiments, the egg-based manufacturing process comprises purifying the influenza virus. In embodiments, an influenza virus is purified using any of the following techniques: centrifugation, chromatography, precipitation, or nanofiltration. In embodiments, the centrifugation technique is ultracentrifugation. In embodiments, the virus is purified using zonal centrifugation. In embodiments, the zonal centrifugation is continuous flow zonal centrifugation.

[0152] In embodiments, the egg-based manufacturing process comprises inactivating (also referred to herein as “killing”) an influenza virus. In embodiments, an influenza virus is inactivated using low pH (e.g., a pH from about 3.5-5.5), heat, ethanol, ultraviolet light, exposure to a detergent (e.g, octylphenol), or exposure to a chemical (e.g., 2-propanol, ethanol, iodopovidone). In embodiments, the purified virus is inactivated with ultraviolet light, betapropiolactone, sodium deoxycholate, formaldehyde, or any combination thereof.

[0153] In embodiments, the egg-based manufacturing process comprises exposing the influenza virus to a surfactant. The surfactant may be sodium taurodeoxycholate, octylphenol ethoxylate (Triton®-X 100), or cetyl trimethyl ammonium bromide. Exposing an influenza virus to a surfactant results in the formation of an influenza split-virion. In embodiments, the at least three HA glycoproteins are in the form of an influenza split-virion.

[0154] In embodiments, the egg-based manufacturing process comprises purifying an influenza antigen (e.g., hemagglutinin) from the virus.

[0155] The following Food and Drug Administration (FDA) approved influenza vaccines are produced using an egg-based manufacturing process: AFLURIA® QUADRIVALENT, FLUARIX® QUADRIVALENT, FLULAVAL QUADRIVALENT, FLUZONE® QUADRIVALENT, FLUZONE® HIGH-DOSE QUADRIVALENT, FLUMIST® QUADRIVALENT, FLUAD®, and FLUAD® QUADRIVALENT.

[0156] In embodiments, each of the at least three HA glycoproteins is isolated using a cell-culture based process. In embodiments, a cell-culture based process comprises (i) growing an influenza virus in a cell and (ii) harvesting the virus from the cell. In embodiments, a cell-culture based process comprises (i) transfecting a cell with a vector comprising a hemagglutinin and (ii) harvesting the hemagglutinin from the cell. In embodiments, a cell-culture based process comprises (i) transducing a cell with a virus encoding a hemagglutinin and (ii) harvesting the hemagglutinin from the cell. In embodiments, the harvested hemagglutinin is recombinant hemagglutinin.

[0157] In embodiments, the cell is an animal cell, a bacterial cell, an insect cell, or a fungal cell. In embodiments, the animal is a human, a bird (e.g., a chicken), a dog, a reptile, a goat, a pig, a mouse, a rabbit, or a rat.

[0158] In embodiments, the virus encoding a hemagglutinin is a baculovirus, a lentivirus, or an adeno-associated virus.

[0159] In embodiments, an influenza virus produced using a cell-culture based process is purified. Any of the purification techniques described to purify influenza virus produced using an egg-based manufacturing process can be used to purify influenza virus produced using a cell-cultured based process.

[0160] In embodiments, a hemagglutinin produced using a cell-culture based process is purified. Purification techniques include chromatography, centrifugation, precipitation, and nanofiltration.

[0161] The Food and Drug Administration (FDA) approved influenza vaccine FLUCELVAX® QUADRIVALENT is produced using a cell-culture based process.

[0162] In embodiments, each of the at least three HA glycoproteins is a recombinant hemagglutinin. The Food and Drug Administration (FDA) approved influenza vaccine FLUBLOK® QUADRIVALENT is a recombinant hemagglutinin.

[0163] In embodiments, the at least three hemagglutinins are in the form of recombinant hemagglutinin. Recombinant hemagglutinin is isolated from a cell that produces hemagglutinin. In embodiments, a cell that produces hemagglutinin has been transfected with a vector encoding hemagglutinin. In embodiments, a cell that produces hemagglutinin has been transduced with a virus encoding hemagglutinin.

[0164] In embodiments, the compositions disclosed herein comprise detergent-core nanoparticles comprising hemagglutinin from an influenza virus. The aforementioned detergent-core nanoparticles are described in detail in U.S. Pat. No. 10,426,829, which is incorporated herein by reference in its entirety for all purposes.

[0165] Detergent-core nanoparticles comprise a hemagglutinin from an influenza virus, which is associated with a detergent core. In embodiments, the hemagglutinin is a trimer. Each nanoparticle may contain 1, 2, 3, 4, 5, 6, 7, 8, 9, 10, 11, 12, 13, 14, or 15 trimers. In embodiments, the nanoparticle contains between about 2 to about 9, about 2 to about 6, or about 5 hemagglutinin trimers. The hemagglutinin is associated with the non-ionic detergent containing core of the nanoparticle. In embodiments, the detergent is selected from polysorbate-20 (PS20), polysorbate-40 (PS40), polysorbate-60 (PS60), polysorbate-65 (PS65) and polysorbate-80 (PS80). The presence of the detergent facilitates formation of the nanoparticles by forming a core that organizes and presents the antigens. In embodiments, the nanoparticles may contain the antigens assembled into multi-oligomeric glycoprotein-PS80 protein-detergent nanoparticles with the head regions projecting outward and hydrophobic regions and PS80 detergent forming a central core surrounded by the antigens.

[0166] The nanoparticles disclosed herein range in Z-ave size from about 20 nm to about 60 nm, about 20 nm to about 50 nm, about 20 nm to about 45 nm, or about 25 nm to about 45 nm.

[0167] In embodiments, a detergent-core nanoparticle is produced in insect cells by expressing HA proteins using a baculovirus expression system and extracting the HA protein with a detergent. During purification, the first detergent is exchanged for a second detergent, typically a non-ionic detergent resulting in nanoparticles having a non-ionic detergent core in which the transmembrane domain of the HA protein, in trimer form, is embedded into. FIG. 7 (left panel) illustrates these structures as observed under an electron microscope.

[0168] The hemagglutinin contained in the detergent-core nanoparticles or in the HaSMaNs described herein may be from any influenza virus strain. Human influenza Type A and Type B viruses cause seasonal epidemics of disease almost every winter in the United States.

[0169] The HA protein may be selected from the sub-types H1, H2, H3, H4, H5, H6, H7, H8, H9, H10, H11, H12, H13, H14, H15, H16, H17, and H18. Phylogenetically, the influenza is split into groups. For HA, Group 1 contains H1, H2, H5, H6, H8, H9, H11, H12, H13, H16, H17, and H18 and group 2 contains H3, H4, H7, H10, H14, and H15.

[0170] In embodiments, the detergent-core nanoparticles or HaSMaNs are trypsin-resistant nanoparticles produced using neutral pH purification. Trypsin resistance is achieved by neutral pH range of above 6.9 to 8.5 during purification and formulation of the HA nanoparticles. Trypsin resistant influenza glycoproteins and trypsin resistant influenza nanoparticles; and methods of making thereof are described in detail in U.S. Pat. No. 10,426,829.

[0171] In embodiments, the hemagglutinin of the detergent-core nanoparticles or HaSMaNs described herein comprises the full-length wild type hemagglutinin amino acid sequence. In embodiments, the hemagglutinin is a hemagglutinin variant. In embodiments, the hemagglutinin exhibits at least 80%, at least 85%, at least 90%, at least 95%, at least 97%, at least 98%, or at least 99% identity to the wild-type hemagglutinin protein.

[0172] HA is a homotrimer with each monomer consisting of ˜550 amino acid residues. Each monomer of HA has been conceptually divided into three domains: the ectodomain of ˜515 residues constitutes the extraviral part of the molecule; a single stretch of 27 residues defines the transmembrane (TM) domain; and ˜10 residues constitute the cytoplasmic tail (CT). While some changes may be made to hemagglutinin, formation of both detergent core nanoparticles and HaSMaNs requires an intact transmembrane domain™. Thus, in particular examples, a modified HA protein sequence comprises 100% identity to the wild-type™ and CT domains with some flexibility in the remaining ectodomain portion, where identity may be at least 90% or at least 95%. The domains may be identified by homology to the amino acid sequences of the TM domains and CT of Japan/305/57 HA shown in FIG. 1 of Melikyan et al. (Mol Biol Cell. 1999 June; 10 (6): 1821-1836) though it should be noted that the boundaries between ectodomain, TM, and CT domains may vary from HA protein to HA protein by up to three amino acids.

[0173] (iib) influenza vaccine-HaSMaNs (Hemagglutinin Saponin Matrix Nanoparticles)

[0174] In embodiments, the immunogenic compositions and vaccine compositions described herein comprise a HaSMaN (Hemagglutinin Saponin Matrix Nanoparticle.) FIG. 7 (right panel) illustrates HaSMaN structures as observed under an electron microscope. The HA glycoproteins decorate the Matrix cage-like structures. The HaSMaN structures are formed by preparing detergent-corenanoparticles comprising hemagglutinin from an influenza virus and then incubating them with ISCOM matrix adjuvant particles for a period of time. ISCOM matrix particles are shown in the center panel of FIG. 7. Notably, the HaSMaNs form readily with Type A influenza HA proteins, but not Type B influenza HA proteins.

[0175] HaSMaNs disclosed herein are produced by incubating the detergent-core nanoparticles with an ISCOM Matrix adjuvant comprising a saponin fraction, cholesterol and a phospholipid. In embodiments, a HaSMaN is formed by incubating a detergent-core nanoparticle with an ISCOM matrix adjuvant for between about 24 hours and about 48 hours. For example, the detergent-core nanoparticle may be incubated with an ISCOM matrix adjuvant for about 24 hours, about 25 hours, about 26 hours, about 27 hours, about 28 hours, about 29 hours, about 30 hours, about 31 hours, about 32 hours, about 33 hours, about 34 hours, about 35 hours, about 36 hours, about 37 hours, about 38 hours, about 39 hours, about 40 hours, about 41 hours, about 42 hours, about 43 hours, about 44 hours, about 45 hours, about 46 hours, about 47 hours, about 48 hours, or more. In some embodiments, a HaSMaN is formed by incubating a detergent-core nanoparticle with an ISCOM matrix adjuvant for at least about 24 hours, at least about 25 hours, at least about 26 hours, at least about 27 hours, at least about 28 hours, at least about 29 hours, at least about 30 hours, at least about 31 hours, at least about 32 hours, at least about 33 hours, at least about 34 hours, at least about 35 hours, at least about 36 hours, at least about 37 hours, at least about 38 hours, at least about 39 hours, at least about 40 hours, at least about 41 hours, at least about 42 hours, at least about 43 hours, at least about 44 hours, at least about 45 hours, at least about 46 hours, at least about 47 hours, or at least about 48 hours. In embodiments, a HaSMaN is formed by incubating a detergent-core nanoparticle with an ISCOM matrix adjuvant at a temperature from about 4° C. to about 25° C. For example, the HaSMaN may be formed by incubating a detergent-core nanoparticle with an ISCOM matrix adjuvant at a temperature of about 4° C., about 5° C., about 6° C., about 7° C., about 8° C., about 9° C., about 10° C., about 11° C., about 12° C., about 13° C., about 14° C., about 15° C., about 16° C., about 17° C., about 18° C., about 19° C., about 20° C., about 21° C., about 22° C., about 23° C., about 24° C., about 25° C., or higher. In embodiments, a HaSMaN is formed by incubating a detergent-core nanoparticle with an ISCOM matrix adjuvant at a temperature of at least about 4° C., at least about 5° C., at least about 6° C., at least about 7° C., at least about 8° C., at least about 9° C., at least about 10° C., at least about 11° C., at least about 12° C., at least about 13° C., at least about 14° C., at least about 15° C., at least about 16° C., at least about 17° C., at least about 18° C., at least about 19° C., at least about 20° C., at least about 21° C., at least about 22° C., at least about 23° C., at least about 24° C., at least about 25° C. Typically, about 24 to 48 hours at 4° C. or 25° C. incubation is required for formation. Formation of HaSMaNs is promoted by higher temperatures. In embodiments, formation of HaSMaN occurs by incubation of detergent-core nanoparticles with an ISCOM Matrix adjuvant for at least 24 hours at about 25° C. Mixing detergent core nanoparticles with ISCOM Matrix adjuvant shortly prior to administering to a subject—i.e. bedside mix, does not produce HaSMaNs. Longer incubation periods do not negatively impact HaSMaNs formation.

### RSV Glycoproteins

[0176] In embodiments, the intranasal immunogenic compositions comprise from 1 to about 50 respiratory syncytial virus (RSV) fusion (F) glycoproteins. The wild-type RSV F glycoprotein is synthesized as a single-chain inactive precursor called F0 that contains three subunits: F1, F2, and a 27-amino acid glycopeptide called pep27 (“p27”). The F1 subunit is located at amino acids 137-574 of the RSV F glycoprotein of SEQ ID NO: 330. The F2 subunit is located at amino acids 26-110 of the RSV F glycoprotein of SEQ ID NO: 2. p27 is located at amino acids 111-136 of the RSV F glycoprotein of SEQ ID NO: 330. The C-terminal F1 subunit contains a transmembrane domain, two heptad repeats, and an N-terminal fusion peptide. The F0 precursor is cleaved by a furin-like protease to form the mature, fusion competent protein. The mature RSV F protein contains an F1 subunit and an F2 subunit connected by a disulfide bond. Additional sources that describe the RSV F protein structure are found at Swanson et al. A Monomeric Uncleaved Respiratory Syncytial Virus F Antigen Retains Prefusion-Specific Neutralizing Epitopes. Journal of Virology, 2014, 88, 11802-11810. Jason S. Mclellan et al. Structure of RSV Fusion Glycoprotein Trimer Bound to a Prefusion-Specific Neutralizing Antibody. Science, 2013, 340, 1113-1117.

[0177] In embodiments, the intranasal immunogenic compositions comprise 1, 2, 3, 4, about 5, about 6, about 7, about 8, about 9, about 10, about 11, about 12, about 13, about 14, about 15, about 16, about 17, about 18, about 19, about 20, about 21, about 22, about 23, about 24, about 25, about 26, about 27, about 28, about 29, about 30, about 31, about 32, about 33, about 34, about 35, about 36, about 37, about 38, about 39, about 40, about 41, about 42, about 43, about 44, about 45, about 46, about 47, about 48, about 49, or about 50 RSV F glycoproteins, including all values and ranges therebetween.

[0178] Multiple examples of RSV F glycoproteins are described in the following patent documents, which are each incorporated by reference herein in their entirety for all purposes: International Publication No. 2017/041100 and International Publication No. 2010/077717.

[0179] In embodiments, provided herein are RSV F glycoproteins that have one or more modifications compared to a native (also referred to as “wild-type”) RSV F glycoprotein. In embodiments, an RSV F glycoprotein from the wild type RSV F A2 strain is the native RSV F glycoprotein. The RSV F glycoprotein from the wild type RSV F A2 strain comprises the amino acid sequence of SEQ ID NO: 330. The wild type RSV F A2 strain has sequencing errors (A102P, V379I, V447M). These sequencing errors are corrected in the non-naturally occurring RSV F glycoproteins described herein, i.e., amino acid 102 is alanine, amino acid 379 is valine, and amino acid 447 is valine.

[0180] In embodiments, the RSV F glycoproteins have one or more modifications selected from the group consisting of: (a) deletion of one or more of amino acids 137-146, which are within the fusion domain; (b) inactivation of the primary furin cleavage site (also referred to as Site II) through mutation of one or more of amino acids 131-136; (c) inactivation of the secondary furin cleavage site (also referred to as Site I) through mutation of one or more of amino acids 106-109; (d) S155C; (e) S290C; (f) S190F; (g) V207L; and (h) N116Q; wherein the modifications are numbered according to the RSV F glycoprotein of SEQ ID NO: 330.

[0181] In embodiments, the RSV F glycoproteins have one or more modifications selected from the group consisting of: (a) deletion of one or more of amino acids 137-146, which are within the fusion domain; (b) inactivation of the primary furin cleavage site (also referred to as Site II) through mutation of one or more of amino acids 131-136; (c) inactivation of the secondary furin cleavage site (also referred to as Site I) through mutation of one or more of amino acids 106-109; (d) S155C; (e) S290C; (f) S190F; and (g) V207L; wherein the modifications are numbered according to the RSV F glycoprotein of SEQ ID NO: 330.

[0182] In aspects, RSV F glycoproteins disclosed herein comprise deletions in the fusion peptide compared to the wild-type RSV F glycoprotein of SEQ ID NO: 330. In embodiments, the RSV F glycoproteins contain an inactivated primary furin cleavage site. In aspects, the cysteine residues are mutated. Typically, the N-linked glycosylation sites are not mutated compared to the corresponding wild-type sequence.

[0183] In embodiments, the RSV F glycoproteins described herein exhibit one or more of the antigenic sites Ø, II, IV, and V. In embodiments, the RSV F proteins described herein exhibit mutations, which result in the presence of one or more of the RSV F antigenic sites Ø, II, IV, and V. The RSV F antigenic site Ø, which is located at the membrane-distal apex of the prefusion RSV F trimer, is targeted by potent RSV F neutralizing antibodies, including 5C4, AM22, and D25. The RSV F antigenic site II, also referred to herein as the palivizumab site, is the target of the antibodies pavilizumab and motavizumab. Antigenic site II is composed of a helix-turn-helix motif that spans residues 253-278. The RSV F antigenic site IV is located on the F1 subunit of the RSV F protein and encompasses residues 422-471 of SEQ ID NO: 330. The RSV F antigenic site V is composed of a2-a3 and B3-B4.

[0184] In embodiments, a particular antigenic site contains epitopes associated with pre-fusion or post-fusion structure. For example, the RSV F antigenic sites Ø and V are exhibited in pre-fusion structures of the RSV F glycoprotein. In contrast, the RSV F antigenic sites II and IV are exhibited in both pre-fusion and post-fusion structures of the RSV F glycoprotein. In embodiments, RSV F proteins contain antigenic sites that induce the formation of neutralizing antibodies against the pre-fusion conformation of the RSV F glycoprotein. In embodiments, the RSV F glycoproteins contain antigenic sites that induce the formation of neutralizing antibodies against the post-fusion conformation of the RSV F glycoprotein. In embodiments, the RSV F glycoproteins described herein contain antigenic sites that induce the production of neutralizing antibodies against both pre-fusion and post-fusion conformations of the RSV F glycoprotein.

[0185] In embodiments, the RSV F glycoproteins comprise a deletion of amino acids 137-146; an inactivated primary furin cleavage site; a S155C mutation; and a S290C mutation, wherein the modifications are numbered according to the RSV F glycoprotein of SEQ ID NO: 330. In embodiments, the RSV F glycoproteins comprise a deletion of amino acids 137-146; an inactivated primary furin cleavage site; a S155C mutation; a S290C mutation; a S190F mutation; and a V207L mutation, wherein the modifications are numbered according to the RSV F glycoprotein of SEQ ID NO: 330. In embodiments, the RSV F glycoproteins comprise a deletion of amino acids 137-146; an inactivated primary furin cleavage site; a S19OF mutation; and a V207L mutation, wherein the modifications are numbered according to the RSV F glycoprotein of SEQ ID NO: 330.

[0186] In embodiments, the RSV F glycoproteins comprise a deletion of amino acids 137-146; an inactivated primary furin cleavage site; and a N116Q mutation, wherein the modifications are numbered according to the RSV F glycoprotein of SEQ ID NO: 330. In embodiments, the RSV F glycoproteins comprise a deletion of amino acids 137-146; an inactivated primary furin cleavage site; a S155C mutation; a S290C mutation; and a N116Q mutation, wherein the modifications are numbered according to the RSV F glycoprotein of SEQ ID NO: 330. In embodiments, the RSV F glycoproteins comprise a deletion of amino acids 137-146; an inactivated primary furin cleavage site; a S190F mutation; a V207L mutation; and a N116Q mutation, wherein the modifications are numbered according to the RSV F glycoprotein of SEQ ID NO: 330. In embodiments, the RSV F glycoproteins comprise a deletion of amino acids 137-146; an inactivated primary furin cleavage site; a S155C mutation; a S290C mutation; a S190F mutation; a V207L mutation; and a N116Q mutation, wherein the modifications are numbered according to the RSV F glycoprotein of SEQ ID NO: 330.

[0187] In embodiments, particular mutations cause the mature RSV F proteins of the disclosure to retain p27 at the N-terminus of the F1 subunit. RSV F proteins which retain p27 contain a p27-F1 subunit and an F2 subunit that are connected by a disulfide bond. In embodiments, a mutation in the primary furin cleavage site leads to retention of p27.

[0188] The primary furin cleavage site, also referred to as Site II herein, is located at residues 131 to 136 of SEQ ID NO: 330. The wild-type primary furin cleavage site has the amino acid sequence of KKRKRR (SEQ ID NO: 341). Inactivation of the primary fusion cleavage site may be achieved by mutating residues in the site, with the result that furin can no longer recognize the consensus site. For example, inactivation of the primary furin cleavage site may be accomplished by introducing at least one, at least two, or three amino acid substitutions at positions corresponding to arginine 133, arginine 135, and arginine 136 of the wild-type RSV F protein (SEQ ID NO:330). In particular aspects, one, two, or all three of the arginines are mutated to glutamine. In other aspects, inactivation is accomplished by mutating the wild-type primary furin cleavage site to one of the following sequences: KKQKQQ (SEQ ID NO: 342), QKQKQQ (SEQ ID NO:343), KKQKRQ (SEQ ID NO: 344), and GRRQQR (SEQ ID NO: 345).

[0189] In embodiments, RSV F glycoproteins described herein comprise a wild-type secondary furin cleavage site. The secondary furin cleavage site, also referred to as Site I herein, is located at residues 106 to 109 of SEQ ID NO: 330. The wild-type secondary furin cleavage site has the amino acid sequence RARR (SEQ ID NO: 6). In embodiments, RSV F glycoproteins described herein comprise an inactive secondary furin-cleavage site. In embodiments, inactivation of the secondary furin cleavage site is accomplished by mutating the wild-type site to one of the following sequences: QQAQ (SEQ ID NO: 7), RAQQ (SEQ ID NO: 348), or RANN (SEQ ID NO: 349).

[0190] In embodiments, the RSV F glycoproteins of the disclosure lack one or more amino acids of the RSV F fusion peptide (amino acids 137-154 of SEQ ID NO: 330). In particular aspects, from 1 to 10 amino acids of the corresponding amino acids 137 to 146 of SEQ ID NO: 330 may be deleted. For example, up to 1, up to 2, up to 3, up to 4, up to 5, up to 6, up to 7, up to 8, up to 9, or up to 10 amino acids within the fusion peptide may be deleted. Alternatively, at least 1, at least 2, at least 3, at least 4, at least 5, at least 6, at least 7, at least 8, at least 9, or at least 10 amino acids within the fusion peptide may be deleted. In embodiments, the deleted amino acids are contiguous. In embodiments, the deleted amino acids are non-contiguous. In embodiments, the RSV F glycoproteins described herein lack the entire fusion peptide.

[0191] In embodiments, the non-naturally occurring RSV F glycoproteins described herein may have a deletion, an insertion, or mutation of up to about 1, up to about 2, up to about 3, up to about 4, up to about 5, up to about 10, up to about 15, up to about 20, up to about 25, or up to about 30 amino acids compared to the amino acid sequence of the F1 domain of SEQ ID NO: 330. The wild-type F1 domain has the amino acid sequence of SEQ ID NO: 350. In embodiments, the RSV F glycoproteins described herein comprise an F1 domain with at least 85%, at least 86%, at least 87%, at least 88%, at least 89%, at least 90%, at least 91%, at least 92%, at least 93%, at least 94%, at least 95%, at least 96%, at least 97%, at least 98%, at least 99%, at least 99.5%, identity, or 100% identity to the F1 domain of SEQ ID NO: 350. The F1 domain of an RSV F glycoprotein herein may have a deletion, an insertion, or mutation of between about 1 and about 5 amino acids, between about 3 and about 10 amino acids, between about 5 and 10 amino acids, between about 8 and 12 amino acids, between about 10 and 15 amino acids, between about 12 and 17 amino acids, between about 15 and 20 amino acids, between about 18 and 23 amino acids, between about 20 and 25 amino acids, between about 22 and about 27 amino acids, or between about 25 and 30 amino acids as compared to the F1 domain of SEQ ID NO: 350.

[0192] In embodiments, the F1 domain of the RSV F glycoproteins comprise one or more mutations selected from the group consisting of S190F, V207L, S155C, S290C, 1379A, and M447V, wherein the modifications are numbered according to the RSV F glycoprotein of SEQ ID NO: 330. In embodiments, the F1 domain of the RSV F glycoproteins comprise S190F and V207 L mutations, wherein the modifications are numbered according to the RSV F glycoprotein of SEQ ID NO: 330. In embodiments, the F1 domain of the RSV F glycoproteins comprise S155C and S290C mutations, wherein the mutations are numbered according to the RSV F glycoprotein of SEQ ID NO: 330. In embodiments, the F1 domain of the RSV F glycoproteins comprise S190F, V207L, S155C, and S290C mutations, wherein the mutations are numbered according to the RSV F glycoprotein of SEQ ID NO: 330.

[0193] In embodiments, the F1 domain of the RSV F glycoproteins comprises an amino acid sequence with at least 85%, at least 86%, at least 87%, at least 88%, at least 89%, at least 90%, at least 91%, at least 92%, at least 93%, at least 94%, at least 95%, at least 96%, at least 97%, at least 98%, at least 99%, at least 99.5% identity, or 100% identity any one of SEQ ID NOS: 350-355.

[0194] In embodiments, the non-naturally occurring RSV F glycoproteins described herein may have a deletion, an insertion, or mutation of up to about 1, up to about 2, up to about 3, up to about 4, up to about 5, up to about 10, up to about 15, up to about 20, up to about 25, or up to about 30 amino acids compared to the amino acid sequence of the F2 domain of SEQ ID NO: 330. The wild-type F2 domain has the amino acid sequence of SEQ ID NO: 356. In embodiments, the RSV F glycoproteins described herein comprise an F2 domain with at least 85%, at least 86%, at least 87%, at least 88%, at least 89%, at least 90%, at least 91%, at least 92%, at least 93%, at least 94%, at least 95%, at least 96%, at least 97%, at least 98%, at least 99%, at least 99.5%, identity, or 100% identity to the F2 domain of SEQ ID NO: 356. The F2 domain of an RSV F glycoprotein herein may have a deletion, an insertion, or mutation of between about 1 and about 5 amino acids, between about 3 and about 10 amino acids, between about 5 and 10 amino acids, between about 8 and 12 amino acids, between about 10 and 15 amino acids, between about 12 and 17 amino acids, between about 15 and 20 amino acids, between about 18 and 23 amino acids, between about 20 and 25 amino acids, between about 22 and about 27 amino acids, or between about 25 and 30 amino acids as compared to the F2 domain of SEQ ID NO: 356.

[0195] In embodiments, the F2 domain of the RSV F glycoproteins may comprise a mutation of P102A, wherein the mutation is numbered according to the RSV F glycoprotein of SEQ ID NO: 330.

[0196] In embodiments, the F2 domain of the RSV F glycoproteins comprises an amino acid sequence with at least 85%, at least 86%, at least 87%, at least 88%, at least 89%, at least 90%, at least 91%, at least 92%, at least 93%, at least 94%, at least 95%, at least 96%, at least 97%, at least 98%, at least 99%, at least 99.5% identity, or 100% identity any one of SEQ ID NOS: 356-357.

[0197] In embodiments, the non-naturally occurring RSV F glycoproteins described herein may have a deletion, an insertion, or mutation of up to about 1, up to about 2, up to about 3, up to about 4, up to about 5, up to about 10, up to about 15, up to about 20, up to about 25, or up to about 30 amino acids compared to the amino acid sequence of p27 of SEQ ID NO: 330. The wild-type p27 has the amino acid sequence of SEQ ID NO: 359. In embodiments, the RSV F glycoproteins described herein comprise a p27 with at least 85%, at least 86%, at least 87%, at least 88%, at least 89%, at least 90%, at least 91%, at least 92%, at least 93%, at least 94%, at least 95%, at least 96%, at least 97%, at least 98%, at least 99%, at least 99.5%, identity, or 100% identity to the p27 of SEQ ID NO: 359. The p27 of an RSV F glycoprotein herein may have a deletion, an insertion, or mutation of between about 1 and about 5 amino acids, between about 3 and about 10 amino acids, between about 5 and 10 amino acids, between about 8 and 12 amino acids, between about 10 and 15 amino acids, or between about 12 and 17 amino acids compared to the p27 of SEQ ID NO: 359.

[0198] In embodiments, the p27 domain of the RSV F glycoproteins may comprise a mutation of N116Q, wherein the mutation is numbered according to the RSV F glycoprotein of SEQ ID NO: 330.

[0199] In embodiments, p27 of the RSV F glycoproteins comprises an amino acid sequence with at least 85%, at least 86%, at least 87%, at least 88%, at least 89%, at least 90%, at least 91%, at least 92%, at least 93%, at least 94%, at least 95%, at least 96%, at least 97%, at least 98%, at least 99%, at least 99.5% identity, or 100% identity any one of SEQ ID NOS: 358-359.

[0200] In embodiments, the RSV F glycoproteins described herein comprise a transmembrane domain. In embodiments, the transmembrane domain has the sequence of ITTIIIVIIVILLSLIAVGLLLYCKARSTPVTLSKDQLSGINNIAFSN (SEQ ID NO: 362). In embodiments, the RSV F glycoproteins described herein may have a deletion, an insertion, or mutation of up to about 1, up to about 2, up to about 3, up to about 4, up to about 5, up to about 10, up to about 15, up to about 20, up to about 25, or up to about 30 amino acids compared to the amino acid sequence of the transmembrane domain. In embodiments, the RSV F glycoprotein lacks the transmembrane domain.

[0201] In embodiments, the RSV F glycoproteins described herein are expressed with an N-terminal signal peptide. In embodiments, the N-terminal signal peptide has an amino acid sequence of SEQ ID NO: 360 (MELLILKANAITTILTAVTFCFASG). In embodiments, the signal peptide may be replaced with any signal peptide that enables expression of the RSV F glycoprotein. In embodiments, one or more of the RSV F glycoprotein signal peptide amino acids may be deleted or mutated. An initiating methionine residue is maintained to initiate expression. In embodiments, the RSV F glycoprotein is encoded by a nucleic acid sequence selected from the group consisting of SEQ ID NO: 361.

[0202] Following expression of the RSV F glycoprotein in a host cell, the N-terminal signal peptide is cleaved to provide the mature RSV F glycoprotein sequence (SEQ ID NOS: 331 and 337-340). In embodiments, the signal peptide is cleaved by host cell proteases. In aspects, the full-length protein may be isolated from the host cell and the signal peptide cleaved subsequently.

[0203] Following cleavage of the signal peptide from the RSV F glycoprotein with an amino acid sequence corresponding to SEQ ID NOS: 332-336 during expression and purification, a mature polypeptide having an amino acid sequence selected from the group consisting of SEQ ID NOS: 331 and 337-340 is obtained and used to produce an RSV F nanoparticle vaccine or RSV F nanoparticles.

[0204] Advantageously, the disclosed RSV F glycoproteins may have enhanced protein expression, stability, and immunogenicity relative to the native RSV F glycoproteins.

[0205] In embodiments, the RSV F glycoproteins described herein contain further modifications from the native RSV F glycoprotein (SEQ ID NO: 330). In embodiments, the RSV F glycoproteins described herein exhibit at least 80%, at least 81%, at least 82%, at least 83%, at least 84%, at least 85%, at least 86%, at least 87%, at least 88%, at least 89%, at least 90%, at least 91%, at least 92%, at least 93%, at least 94%, at least 95%, at least 96%, at least 97%, at least 98%, at least 99%, or 100% identity to the native RSV F glycoprotein.

[0206] In embodiments, the RSV F glycoproteins described herein are at least 90%, at least 91%, at least 92%, at least 93%, at least 94%, at least 95%, at least 96%, at least 97%, at least 98%, at least 99%, or at least 99.5% identical to an RSV F glycoprotein having an amino acid selected from the group consisting of SEQ ID NOS: 329-340. A RSV F glycoprotein may have a deletion, an insertion, or mutation of up to about 1, up to about 2, up to about 3, up to about 4, up to about 5, up to about 10, up to about 15, up to about 20, up to about 25, up to about 30, up to about 35, up to about 40, up to about 45, or up to about 50 amino acids compared to the amino acid sequence of the RSV F glycoprotein having an amino acid sequence of any one of SEQ ID NO: 329-340. A RSV F glycoprotein may have may have a deletion, an insertion, or mutation of between about 1 and about 5 amino acids, between about 3 and about 10 amino acids, between about 5 and 10 amino acids, between about 8 and 12 amino acids, between about 10 and 15 amino acids, between about 12 and 17 amino acids, between about 15 and 20 amino acids, between about 18 and 23 amino acids, between about 20 and 25 amino acids, between about 22 and about 27 amino acids, between about 25 and 30 amino acids, between about 30 and 35 amino acids, between about 35 and 40 amino acids, between about 40 and 45 amino acids, or between about 45 and 50 amino acids, as compared to the RSV F glycoprotein having an amino acid sequence of any one of SEQ ID NOS: 329-340. In embodiments, RSV F glycoproteins described herein comprise about 1, about 2, about 3, about 4, about 5, about 6, about 7, about 8, about 9, about 10, about 11, about 12, about 13, about 14, about 15, about 16, about 17, about 18, about 19, about 20, about 21, about 22, about 23, about 24, or about 25 modifications compared to the RSV F glycoprotein having an amino acid sequence of any one of SEQ ID NOS: 329-340.

[0207] In embodiments, the RSV F glycoprotein is extended at the N-terminus, the C-terminus, or both the N-terminus and the C-terminus. In embodiments, the extension is a tag useful for a function, such as purification or detection. In embodiments, the extension may be an N-terminal signal peptide fused to the protein to enhance expression. While such signal peptides are often cleaved during expression in the cell, some nanoparticles may contain the antigen with an intact signal peptide. Thus, when a nanoparticle comprises an antigen, the antigen may contain an extension and thus may be a fusion protein when incorporated into nanoparticles.

[0208] In embodiments, the RSV F glycoprotein comprises a fusion protein. In embodiments, the RSV F glycoprotein comprises an N-terminal fusion protein. In embodiments, the RSV F glycoprotein comprises a C-terminal fusion protein. In embodiments, the fusion protein encompasses any tag described herein. In embodiments, the tag is useful for protein expression, purification, or detection. In embodiments, the tag is a protease cleavage site. Non-limiting examples of protease cleavage sites include the HRV3C protease cleavage site, chymotrypsin, trypsin, elastase, endopeptidase, caspase-1, caspase-2, caspase-3, caspase-4, caspase-5, caspase-6, caspase-7, caspase-8, caspase-9, caspase-10, enterokinase, factor Xa, Granzyme B, TEV protease, and thrombin. In embodiments, the protease cleavage site is an HRV3C protease cleavage site.

### Adjuvants

[0209] In embodiments, the compositions disclosed herein may be combined with one or more adjuvants to enhance an immune response. In embodiments, the compositions are prepared without adjuvants, and are thus available to be administered as adjuvant-free compositions.

[0210] Advantageously, adjuvant-free compositions disclosed herein may provide protective immune responses when administered as a single dose. Alum-free compositions that induce robust immune responses are especially useful in adults about 60 and older.

### Aluminum-Based Adjuvants

[0211] In embodiments, the adjuvant may be alum (e.g. AlPO4 or Al(OH)3). In embodiments, the nanoparticle is substantially bound to the alum. In embodiments, the nanoparticle may be at least 80% bound, at least 85% bound, at least 90% bound or at least 95% bound to the alum. In embodiments, the nanoparticle is 92% to 97% bound to the alum in a composition. The amount of alum is present per dose is typically in a range between about 400 μg to about 1250 μg. For example, the alum may be present in a per dose amount of about 300 μg to about 900 μg, about 400 μg to about 800 μg, about 500 μg to about 700 μg, about 400 μg to about 600 μg, or about 400 μg to about 500 μg. Typically, the alum is present at about 400 μg for a dose of 120 μg of the protein nanoparticle.

### Saponin Adjuvants

[0212] Adjuvants containing saponin may also be combined with the immunogens disclosed herein. Saponins are glycosides derived from the bark of the Quillaja Saponaria Molina tree. Typically, saponin is prepared using a multi-step purification process resulting in multiple fractions. As used, herein, the term “a saponin fraction from Quillaja Saponaria Molina” is used generically to describe a semi-purified or defined saponin fraction of Quillaja saponaria or a substantially pure fraction thereof.

[0213] Several approaches for producing saponin fractions are suitable. Fractions A, B, and C are described in U.S. Pat. No. 6,352,697 and may be prepared as follows. A lipophilic fraction from Quil A, a crude aqueous Quillaja Saponaria Molina extract, is separated by chromatography and eluted with 70% acetonitrile in water to recover the lipophilic fraction. This lipophilic fraction is then separated by semi-preparative HPLC with elution using a gradient of from 25% to 60% acetonitrile in acidic water. The fraction referred to herein as “Fraction A” or “QH-A” is, or corresponds to, the fraction, which is eluted at approximately 39% acetonitrile. The fraction referred to herein as “Fraction B” or “QH-B” is, or corresponds to, the fraction, which is eluted at approximately 47% acetonitrile. The fraction referred to herein as “Fraction C” or “QH-C” is, or corresponds to, the fraction, which is eluted at approximately 49% acetonitrile. Additional information regarding purification of Fractions is found in U.S. Pat. No. 5,057,540. When prepared as described herein, Fractions A, B and C of Quillaja Saponaria Molina each represent groups or families of chemically closely related molecules with definable properties. The chromatographic conditions under which they are obtained are such that the batch-to-batch reproducibility in terms of elution profile and biological activity is highly consistent.

[0214] Other saponin fractions have been described. Fractions B3, B4 and B4b are described in EP 0436620. Fractions QA1-QA22 are described EP03632279 B2, Q-VAC (Nor-Feed, AS Denmark), Quillaja Saponaria Molina Spikoside (Isconova AB, Ultunaallén 2B, 756 51 Uppsala, Sweden). Fractions QA-1, QA-2, QA-3, QA-4, QA-5, QA-6, QA-7, QA-8, QA-9, QA-10, QA-11, QA-12, QA-13, QA-14, QA-15, QA-16, QA-17, QA-18, QA-19, QA-20, QA-21, and QA-22 of EP 0 3632 279 B2, especially QA-7, QA-17, QA-18, and QA-21 may be used. They are obtained as described in EP 0 3632 279 B2, especially at page 6 and in Example 1 on page 8 and 9.

[0215] The saponin fractions described herein and used for forming adjuvants are often substantially pure fractions; that is, the fractions are substantially free of the presence of contamination from other materials. In particular aspects, a substantially pure saponin fraction may contain up to 40% by weight, up to 30% by weight, up to 25% by weight, up to 20% by weight, up to 15% by weight, up to 10% by weight, up to 7% by weight, up to 5% by weight, up to 2% by weight, up to 1% by weight, up to 0.5% by weight, or up to 0.1% by weight of other compounds such as other saponins or other adjuvant materials.

[0216] Saponin fractions may be administered in the form of a cage-like particle referred to as an ISCOM (Immune Stimulating COMplex). ISCOMs may be prepared as described in EP0109942B1, EP0242380B1 and EP0180546 B1. In embodiments, a transport and/or a passenger antigen may be used, as described in EP 9600647-3 (PCT/SE97/00289).

[0217] In embodiments, the ISCOM is an ISCOM matrix complex. An ISCOM matrix complex comprises at least one saponin fraction and a lipid. The lipid is at least a sterol, such as cholesterol. In embodiments, the ISCOM matrix complex also contains a phospholipid. The ISCOM matrix complexes may also contain one or more other immunomodulatory (adjuvant-active) substances, not necessarily a glycoside, and may be produced as described in EP0436620B1, which is incorporated by reference in its entirety herein.

[0218] In other aspects, the ISCOM is an ISCOM complex. An ISCOM complex contains at least one saponin, at least one lipid, and at least one kind of antigen or epitope. The ISCOM complex contains antigen associated by detergent treatment such that that a portion of the antigen integrates into the particle. In contrast, ISCOM matrix is formulated as an admixture with antigen and the association between ISCOM matrix particles and antigen is mediated by electrostatic and/or hydrophobic interactions.

[0219] In embodiments, the saponin fraction is integrated into an ISCOM matrix complex or an ISCOM complex, or at least one additional adjuvant, which also is integrated into the ISCOM or ISCOM matrix complex or mixed therewith, is selected from fraction A, fraction B, or fraction C of Quillaja saponaria, a semipurified preparation of Quillaja saponaria, a purified preparation of Quillaja saponaria, or any purified sub-fraction e.g., QA 1-21.

[0220] In particular aspects, each ISCOM particle may contain at least two saponin fractions. Any combinations of weight % of different saponin fractions may be used. Any combination of weight % of any two fractions may be used. For example, the particle may contain any weight % of fraction A and any weight % of another saponin fraction, such as a crude saponin fraction or fraction C, respectively. Accordingly, in particular aspects, each ISCOM matrix particle or each ISCOM complex particle may contain from 0.1 to 99.9 by weight, 5 to 95% by weight, 10 to 90% by weight 15 to 85% by weight, 20 to 80% by weight, 25 to 75% by weight, 30 to 70% by weight, 35 to 65% by weight, 40 to 60% by weight, 45 to 55% by weight, 40 to 60% by weight, or 50% by weight of one saponin fraction, e.g. fraction A and the rest up to 100% in each case of another saponin e.g. any crude fraction or any other faction e.g. fraction C. The weight is calculated as the total weight of the saponin fractions. Examples of ISCOM matrix complex and ISCOM complex adjuvants are disclosed in U.S Published Application No. 2013/0129770, which is incorporated by reference in its entirety herein.

[0221] In embodiments, the ISCOM matrix or ISCOM complex comprises from 5-99% by weight of one fraction, e.g. fraction A and the rest up to 100% of weight of another fraction e.g. a crude saponin fraction or fraction C. The weight is calculated as the total weight of the saponin fractions.

[0222] In embodiment, the ISCOM matrix or ISCOM complex comprises from 40% to 99% by weight of one fraction, e.g. fraction A and from 1% to 60% by weight of another fraction, e.g. a crude saponin fraction or fraction C. The weight is calculated as the total weight of the saponin fractions.

[0223] In embodiments, the ISCOM matrix or ISCOM complex comprises from 70% to 95% by weight of one fraction e.g., fraction A, and from 30% to 5% by weight of another fraction, e.g., a crude saponin fraction, or fraction C. The weight is calculated as the total weight of the saponin fractions. In other embodiments, the saponin fraction from Quillaja Saponaria Molina is selected from any one of QA 1-21.

[0224] In addition to particles containing mixtures of saponin fractions, ISCOM matrix particles and ISCOM complex particles may each be formed using only one saponin fraction. Compositions disclosed herein may contain multiple particles wherein each particle contains only one saponin fraction. That is, certain compositions may contain one or more different types of ISCOM-matrix complexes particles and/or one or more different types of ISCOM complexes particles, where each individual particle contains one saponin fraction from Quillaja Saponaria Molina, wherein the saponin fraction in one complex is different from the saponin fraction in the other complex particles.

[0225] In embodiments, one type of saponin fraction or a crude saponin fraction may be integrated into one ISCOM matrix complex or particle and another type of substantially pure saponin fraction, or a crude saponin fraction, may be integrated into another ISCOM matrix complex or particle. A composition or vaccine may comprise at least two types of complexes or particles each type having one type of saponins integrated into physically different particles.

[0226] In the compositions, mixtures of ISCOM matrix complex particles and/or ISCOM complex particles may be used in which one saponin fraction Quillaja Saponaria Molina and another saponin fraction Quillaja Saponaria Molina are separately incorporated into different ISCOM matrix complex particles and/or ISCOM complex particles.

[0227] The ISCOM matrix or ISCOM complex particles, which each have one saponin fraction, may be present in composition at any combination of weight %. In particular aspects, a composition may contain 0.1% to 99.9% by weight, 5% to 95% by weight, 10% to 90% by weight, 15% to 85% by weight, 20% to 80% by weight, 25% to 75% by weight, 30% to 70% by weight, 35% to 65% by weight, 40% to 60% by weight, 45% to 55% by weight, 40 to 60% by weight, or 50% by weight, of an ISCOM matrix or complex containing a first saponin fraction with the remaining portion made up by an ISCOM matrix or complex containing a different saponin fraction. In aspects, the remaining portion is one or more ISCOM matrix or complexes where each matrix or complex particle contains only one saponin fraction. In other aspects, the ISCOM matrix or complex particles may contain more than one saponin fraction.

[0228] In particular compositions, the only saponin fraction in a first ISCOM matrix or ISCOM complex particle is Fraction A and the only saponin fraction in a second ISCOM matrix or ISCOM complex particle is Fraction C.

[0229] In embodiments, the Fraction A of Quillaja Saponaria Molina accounts for at least about 80%, 81%, 82%, 83%, 84%, 85%, 86%, 87%, 88%, 89%, 90%, 91%, 92%, 93%, 94%, 95%, 96%, 97%, 98%, or 99% by weight, and fraction C of Quillaja Saponaria Molina accounts for the remainder, respectively, of the sum of the weights of fraction A of Quillaja Saponaria Molina and fraction C of Quillaja Saponaria Molina in the adjuvant.

[0230] Preferred compositions comprise a first ISCOM matrix containing Fraction A and a second ISCOM matrix containing Fraction C, wherein the Fraction A ISCOM matrix constitutes about 70% per weight of the total saponin adjuvant, and the Fraction C ISCOM matrix constitutes about 30% per weight of the total saponin adjuvant. In another preferred composition, the Fraction A ISCOM matrix constitutes about 85% per weight of the total saponin adjuvant, and the Fraction C ISCOM matrix constitutes about 15% per weight of the total saponin adjuvant. In another preferred composition, the Fraction A ISCOM matrix constitutes about 92% per weight of the total saponin adjuvant, and the Fraction C ISCOM matrix constitutes about 8% per weight of the total saponin adjuvant. Thus, in certain compositions, the Fraction A ISCOM matrix is present in a range of about 70% to about 85%, and Fraction C ISCOM matrix is present in a range of about 15% to about 30%, of the total weight amount of saponin adjuvant in the composition. In certain compositions, the Fraction A ISCOM matrix is present in a range of about 70% to about 92%, and Fraction C ISCOM matrix is present in a range of about 8% to about 30%, of the total weight amount of saponin adjuvant in the composition. In embodiments, the Fraction A ISCOM matrix accounts for 50-96% by weight and Fraction C ISCOM matrix accounts for the remainder, respectively, of the sums of the weights of Fraction A ISCOM matrix and Fraction C ISCOM in the adjuvant. In a particularly preferred composition, referred to herein as MATRIX-M®, the Fraction A ISCOM matrix is present at about 85% and Fraction C ISCOM matrix is present at about 15% of the total weight amount of saponin adjuvant in the composition. MATRIX-M® may be referred to interchangeably as Matrix-M1.

[0231] Exemplary QS-7 and QS-21 fractions, their production and their use is described in U.S. Pat. Nos. 5,057,540; 6,231,859; 6,352,697; 6,524,584; 6,846,489; 7,776,343, and 8,173,141, which are incorporated by reference herein.

[0232] In embodiments, other adjuvants may be used in addition or as an alternative. The inclusion of any adjuvant described in Vogel et al., “A Compendium of Vaccine Adjuvants and Excipients (2nd Edition),” herein incorporated by reference in its entirety for all purposes, is envisioned within the scope of this disclosure. Other adjuvants include complete Freund's adjuvant (a non-specific stimulator of the immune response containing killed Mycobacterium tuberculosis), incomplete Freund's adjuvants and aluminum hydroxide adjuvant. Other adjuvants comprise GMCSP, BCG, MDP compounds, such as thur-MDP and nor-MDP, CGP (MTP-PE), lipid A, and monophosphoryl lipid A (MPL), MF-59, RIBI, which contains three components extracted from bacteria, MPL, trehalose dimycolate (TDM) and cell wall skeleton (CWS) in a 2% squalene/TWEEN® polysorbate 80 emulsion. In embodiments, the adjuvant may be a paucilamellar lipid vesicle; for example, NOVASOMES®. NOVASOMES® are paucilamellar nonphospholipid vesicles ranging from about 100 nm to about 500 nm. They comprise BRIJ® alcohol ethoxylate 72, cholesterol, oleic acid and squalene. NOVASOMES® have been shown to be an effective adjuvant (see, U.S. Pat. Nos. 5,629,021, 6,387,373, and 4,911,928).

### Production of Nanoparticles Comprising Viral Glycoproteins

[0233] The nanoparticles of the present disclosure are non-naturally occurring products, the components of which do not occur together in nature. Generally, the methods disclosed herein use a detergent exchange approach wherein a first detergent is used to isolate a viral glycoprotein and then that first detergent is exchanged for a second detergent to form the nanoparticles.

[0234] The viral glycoproteins contained in the nanoparticles are typically produced by recombinant expression in host cells. Standard recombinant techniques may be used. In embodiments, the viral glycoproteins are expressed in insect host cells using a baculovirus system. In embodiments, from 1-50 viral glycoproteins are co-expressed in a host cell. In embodiments, the baculovirus is a cathepsin-L knock-out baculovirus, a chitinase knock-out baculovirus. Optionally, the baculovirus is a double knock-out for both cathepsin-L and chitinase. High level expression may be obtained in insect cell expression systems. Non limiting examples of insect cells are, Spodoptera frugiperda (Sf) cells, e.g. Sf9, Sf21, Trichoplusiani cells, e.g. High Five cells, and Drosophila S2 cells. In embodiments, the viral glycoproteins described herein are produced in any suitable host cell. In embodiments, the host cell is an insect cell. In embodiments, the insect cell is an Sf9 cell.

[0235] Typical transfection and cell growth methods can be used to culture the cells. Vectors, e.g., vectors comprising polynucleotides that encode fusion proteins, can be transfected into host cells according to methods well known in the art. For example, introducing nucleic acids into eukaryotic cells can be achieved by calcium phosphate co-precipitation, electroporation, microinjection, lipofection, and transfection employing polyamine transfection reagents. In one embodiment, the vector is a recombinant baculovirus.

[0236] Methods to grow host cells include, but are not limited to, batch, batch-fed, continuous and perfusion cell culture techniques. Cell culture means the growth and propagation of cells in a bioreactor (a fermentation chamber) where cells propagate and express protein (e.g. recombinant proteins) for purification and isolation. Typically, cell culture is performed under sterile, controlled temperature and atmospheric conditions in a bioreactor. A bioreactor is a chamber used to culture cells in which environmental conditions such as temperature, atmosphere, agitation and/or pH can be monitored. In one embodiment, the bioreactor is a stainless steel chamber. In another embodiment, the bioreactor is a pre-sterilized plastic bag (e.g. Cellbag®, Wave Biotech, Bridgewater, N.J.). In other embodiment, the pre-sterilized plastic bags are about 50 L to 3500 L bags.

[0237] After growth of the host cells, the protein may be harvested from the host cells using detergents and purification protocols. In embodiments, multiple viral glycoproteins are purified simultaneously. In embodiments, host cells expressing multiple viral glycoproteins are pooled together. Once the host cells have grown for 48 to 96 hours, the cells are isolated from the media and a detergent-containing solution is added to solubilize the cell membrane, releasing the protein in a detergent extract. Triton X-100 and TERGITOL® nonylphenol ethoxylate, also known as NP-9, are each preferred detergents for extraction. The detergent may be added to a final concentration of about 0.1% to about 1.0%. For example, the concentration may be about 0.1%, about 0.2%, about 0.3%, about 0.5%, about 0.7%, about 0.8%, or about 1.0%. The range may be about 0.1% to about 0.3%. In aspects, the concentration is about 0.5%.

[0238] In other aspects, different first detergents may be used to isolate the protein from the host cell. For example, the first detergent may be Bis(polyethylene glycol bis [imidazoylcarbonyl]), nonoxynol-9, Bis(polyethylene glycol bis [imidazoyl carbonyl]), BRIJ® Polyethylene glycol dodecyl ether 35, BRIJ® Polyethylene glycol (3) cetyl ether 56, BRIJ® alcohol ethoxylate 72, BRIJ® Polyoxyl 2 stearyl ether 76, BRIJ® polyethylene glycol monoolelyl ether 92V, BRIJ® Polyoxyethylene (10) oleyl ether 97, BRIJ® Polyethylene glycol hexadecyl ether 58P, CREMOPHOR® EL Macrogolglycerol ricinoleate, Decaethyleneglycol monododecyl ether, N-Decanoyl-N-methylglucamine, n-Decyl alpha-Dglucopyranoside,Decyl beta-D-maltopyranoside, n-Dodecanoyl-N-methylglucamide, nDodecyl alpha-D-maltoside, n-Dodecyl beta-D-maltoside, n-Dodecyl beta-D-maltoside,Heptaethylene glycol monodecyl ether, Heptaethylene glycol monododecyl ether, Heptaethylene glycol monotetradecyl ether, n-Hexadecyl beta-D-maltoside, Hexaethylene glycol monododecyl ether, Hexaethylene glycol monohexadecyl ether, Hexaethylene glycol monooctadecyl ether, Hexaethylene glycol monotetradecyl ether, Igepal CA-630,Igepal CA-630, Methyl-6-O-(N-heptylcarbamoyl)-alpha-D-glucopyranoside,Nonaethylene glycol monododecyl ether, N-Nonanoyl-N-methylglucamine, N-NonanoyIN-methylglucamine, Octaethylene glycol monodecyl ether, Octaethylene glycolmonododecyl ether, Octaethylene glycol monohexadecyl ether, Octaethylene glycol monooctadecyl ether, Octaethylene glycol monotetradecyl ether, Octyl-beta-D glucopyranoside, Pentaethylene glycol monodecyl ether, Pentaethylene glycol monododecyl ether, Pentaethylene glycol monohexadecyl ether, Pentaethylene glycol monohexyl ether, Pentaethylene glycol monooctadecyl ether, Pentaethylene glycol monooctyl ether, Polyethylene glycol diglycidyl ether, Polyethylene glycol ether W-1, Polyoxyethylene 10 tridecyl ether, Polyoxyethylene 100 stearate, Polyoxyethylene 20 isohexadecyl ether, Polyoxyethylene 20 oleyl ether, Polyoxyethylene 40 stearate, Polyoxyethylene 50 stearate, Polyoxyethylene 8 stearate, Polyoxyethylene bis(imidazolyl carbonyl), Polyoxyethylene 25 propylene glycol stearate, Saponin from Quillaja bark, SPAN® 20 sorbitan laurate, SPAN® 40 sorbitan monopalmitate, SPAN® 60 sorbitan stearate, SPAN® 65 sorbitan tristearate, SPAN® 80 sorbitane monooleate, SPAN® 85 sorbitane trioleate, TERGITOL® secondary alcohol ethoxylate Type 15-S-12, TERGITOL® secondary alcohol ethoxylate Type 15-S-30, TERGITOL® secondary alcohol ethoxylate Type 15-S-5, TERGITOL® secondary alcohol ethoxylate Type 15-S-7, TERGITOL® secondary alcohol ethoxylate Type 15-S-9, TERGITOL® nonylphenol ethoxylate Type NP-10, TERGITOL® nonylphenol ethoxylate Type NP-4, TERGITOL® nonylphenol ethoxylate Type NP-40, TERGITOL® nonylphenol ethoxylate Type NP-7, TERGITOL® nonylphenol ethoxylate Type NP-9, TERGITOL® branched secondary alcohol ethoxylate Type TMN-10, TERGITOL® branched secondary alcohol ethoxylate Type TMN-6, TRITON™ X-100 Polyethylene glycol tert-octylphenyl ether or combinations thereof.

[0239] The nanoparticles may then be isolated from cellular debris using centrifugation. In embodiments, gradient centrifugation, such as using cesium chloride, sucrose and iodixanol, may be used. Other techniques may be used as alternatives or in addition, such as standard purification techniques including, e.g., ion exchange, affinity, and gel filtration chromatography.

[0240] For example, the first column may be an ion exchange chromatography resin, such as FRACTOGEL® EMD methacrylate based polymeric beads TMAE (EMD Millipore), the second column may be a lentil (Lens culinaris) lectin affinity resin, and the third column may be a cation exchange column such as a FRACTOGEL® EMD methacrylate based polymeric beads SO3 (EMD Millipore) resin. In other aspects, the cation exchange column may be an MMC column or a Nuvia C Prime column (Bio-Rad Laboratories, Inc). Preferably, the methods disclosed herein do not use a detergent extraction column; for example a hydrophobic interaction column. Such a column is often used to remove detergents during purification but may negatively impact the methods disclosed here.

[0241] To form nanoparticles, the first detergent, used to extract the protein from the host cell is substantially replaced with a second detergent to arrive at the nanoparticle structure. NP-9 is a preferred extraction detergent. Typically, the nanoparticles do not contain detectable NP-9 when measured by HPLC. The second detergent is typically selected from the group consisting of PS20, PS40, PS60, PS65, and PS80. Preferably, the second detergent is PS80.

[0242] In particular aspects, detergent exchange is performed using affinity chromatography to bind glycoproteins via their carbohydrate moiety. For example, the affinity chromatography may use a legume lectin column. Legume lectins are proteins originally identified in plants and found to interact specifically and reversibly with carbohydrate residues. See, for example, Sharon and Lis, “Legume lectins—a large family of homologous proteins,” FASEB J. 1990 November;4 (14): 3198-208; Liener, “The Lectins: Properties, Functions, and Applications in Biology and Medicine,” Elsevier, 2012. Suitable lectins include concanavalin A (con A), pea lectin, sainfoin lect, and lentil lectin. Lentil lectin is a preferred column for detergent exchange due to its binding properties. Lectin columns are commercially available; for example, Capto Lentil Lectin, is available from GE Healthcare. In certain aspects, the lentil lectin column may use a recombinant lectin. At the molecular level, it is thought that the carbohydrate moieties bind to the lentil lectin, freeing the amino acids of the protein to coalesce around the detergent resulting in the formation of a detergent core providing nanoparticles having multiple copies of the antigen, e.g., glycoprotein oligomers which can be dimers, trimers, or tetramers anchored in the detergent. In embodiments, the viral glycoproteins form trimers. In embodiments, the viral glycoprotein trimers are anchored in detergent. In embodiments, each viral glycoprotein nanoparticle contains at least one trimer associated with a non-ionic core.

[0243] The detergent, when incubated with the protein to form the nanoparticles during detergent exchange, may be present at up to about 0.1% (w/v) during early purifications steps and this amount is lowered to achieve the final nanoparticles having optimum stability. For example, the non-ionic detergent (e.g., PS80) may be about 0.005% (v/v) to about 0.1% (v/v), for example, about 0.005% (v/v), about 0.006% (v/v), about 0.007% (v/v), about 0.008% (v/v), about 0.009% (v/v), about 0.01% (v/v), about 0.015% (v/v), about 0.02% (v/v), about 0.025% (v/v), about 0.03% (v/v), about 0.035% (v/v), about 0.04% (v/v), about 0.045% (v/v), about 0.05% (v/v), about 0.055% (v/v), about 0.06% (v/v), about 0.065% (v/v), about 0.07% (v/v), about 0.075% (v/v), about 0.08% (v/v), about 0.085% (v/v), about 0.09% (v/v), about 0.095% (v/v), or about 0.1% (v/v) PS80. In embodiments, the nanoparticle contains about 0.03% to about 0.05% PS80. In embodiments, the nanoparticle contains about 0.01% (v/v) PS80.

[0244] In embodiments, purified viral glycoproteins are dialyzed. In embodiments, dialysis occurs after purification. In embodiments, the viral glycoproteins are dialyzed in a solution comprising sodium phosphate, NaCl, and PS80. In embodiments, the dialysis solution comprising sodium phosphate contains between about 5 mM and about 100 mM of sodium phosphate, for example, about 5 mM, about 10 mM, about 15 mM, about 20 mM, about 25 mM, about 30 mM, about 35 mM, about 40 mM, about 45 mM, about 50 mM, about 55 mM, about 60 mM, about 65 mM, about 70 mM, about 75 mM, about 80 mM, about 85 mM, about 90 mM, about 95 mM, or about 100 mM sodium phosphate. In embodiments, the pH of the solution comprising sodium phosphate is about 6.5, about 6.6, about 6.7, about 6.8, about 6.9, about 7.0, about 7.1, about 7.2, about 7.3, about 7.4, or about 7.5. In embodiments, the dialysis solution comprising sodium chloride comprises about 50 mM NaCl to about 750 mM NaCl, for example, about 50 mM, about 60 mM, about 70 mM, about 80 mM, about 90 mM, about 100 mM, about 110 mM, about 120 mM, about 130 mM, about 140 mM, about 150 mM, about 160 mM, about 170 mM, about 180 mM, about 190 mM, about 200 mM, about 210 mM, about 220 mM, about 230 mM, about 240 mM, about 250 mM, about 260 mM, about 270 mM, about 280 mM, about 290 mM, about 300 mM, about 310 mM, about 320 mM, about 330 mM, about 340 mM, about 350 mM, about 360 mM, about 370 mM, about 380 mM, about 390 mM, about 400 mM, about 410 mM, about 420 mM, about 430 mM, about 440 mM, about 450 mM, about 460 mM, about 470 mM, about 480 mM, about 490 mM, about 500 mM, about 510 mM, about 520 mM, about 530 mM, about 540 mM, about 550 mM, about 560 mM, about 570 mM, about 580 mM, about 590 mM, about 600 mM, about 610 mM, about 620 mM, about 630 mM, about 640 mM, about 650 mM, about 660 mM, about 670 mM, about 680 mM, about 690, about 700 mM, about 710 mM, about 720 mM, about 730 mM, about 740 mM, or about 750 mM NaCl. In embodiments, the dialysis solution comprising PS80 comprises about 0.005% (v/v), about 0.006% (v/v), about 0.007% (v/v), about 0.008% (v/v), about 0.009% (v/v), about 0.01% (v/v), about 0.015% (v/v), about 0.02% (v/v), about 0.025% (v/v), about 0.03% (v/v), about 0.035% (v/v), about 0.04% (v/v), about 0.045% (v/v), about 0.05% (v/v), about 0.055% (v/v), about 0.06% (v/v), about 0.065% (v/v), about 0.07% (v/v), about 0.075% (v/v), about 0.08% (v/v), about 0.085% (v/v), about 0.09% (v/v), about 0.095% (v/v), or about 0.1% (v/v) PS80. In embodiments, the dialysis solution comprises about 25 mM sodium phosphate (pH 7.2), about 300 mM NaCl, and about 0.01% (v/v) PS80.

[0245] In embodiments, the pharmaceutically acceptable buffer comprises 10 mM sodium phosphate, 150 mM NaCl, 100 mM arginine, 5% trehalose, and 0.03% PS80 at a pH of 7.5. In embodiments, the pharmaceutically acceptable buffer comprises 25 mM sodium phosphate, 300 mM NaCl, and 0.03% PS80 at a pH of 7.2. In embodiments, the pharmaceutically acceptable buffer comprises 25 mM sodium phosphate, 600 mM NaCl, and 0.01% PS80 at a pH of 6.8.

[0246] Detergent exchange may be performed with proteins purified as discussed above and purified, frozen for storage, and then thawed for detergent exchange.

[0247] Stability of compositions disclosed herein may be measured in a variety of ways. In one approach, a peptide map may be prepared to determine the integrity of the antigen protein after various treatments designed to stress the nanoparticles by mimicking harsh storage conditions. Thus, a measure of stability is the relative abundance of antigen peptides in a stressed sample compared to a control sample. For example, the stability of nanoparticles containing the viral glycoproteins may be evaluated by exposing the nanoparticles to various pHs, proteases, salt, oxidizing agents, including but not limited to hydrogen peroxide, various temperatures, freeze/thaw cycles, and agitation. It is thought that the position of the glycoprotein anchored into the detergent core provides enhanced stability by reducing undesirable interactions. For example, the improved protection against protease-based degradation may be achieved through a shielding effect whereby anchoring the glycoproteins into the core at the molar ratios disclosed herein results in steric hindrance blocking protease access. Stability may also be measured by monitoring intact proteins.

[0248] In embodiments, provided herein are immunogenic compositions containing nanoparticles comprising SARS-COV-2 S glycoproteins.

### Additional Excipients in Intranasal Immunogenic Compositions

[0249] In embodiments, the intranasal immunogenic compositions comprise one or more additional ingredient selected from the group consisting of a viscosity agent, a bulking agent, a dispersant, a filler, a carrier agent, a moisturizing agent, and a flavoring agent. Examples of each of these ingredients are described herein.

Amounts of Viral Glycoproteins and/or Adjuvants in Immunogenic Compositions

[0250] In embodiments, the immunogenic compositions described herein comprise from about 1 μg to about 400 μg, from 1 μg to about 350 μg, from 1 μg to about 300 μg, from 1 μg to about 250 μg, from 1 μg to about 200 μg, from 1 μg to about 150 μg, from 1 μg to about 100 μg, from 1 μg to about 50 μg, or from 1 μg to about 25 μg of each viral glycoprotein. In embodiments, the immunogenic compositions comprise about 1 μg, about 2 μg, about 3 μg, about 4 μg, about 5 μg, about 6 μg, about 7 μg, about 8 μg, about 9 μg, about 10 μg, about 11 μg, about 12 μg, about 13 μg, about 14 μg, about 15 μg, about 16 μg, about 17 μg, about 18 μg, about 19 μg, about 20 μg, about 21 μg, about 22 μg, about 23 μg, about 24 μg, about 25 μg, about 26 μg, about 27 μg, about 28 μg, about 29 μg, about 30 μg, about 31 μg, about 32 μg, about 33 μg, about 34 μg, about 35 μg, about 36 μg, about 37 μg, about 38 μg, about 39 μg, about 40 μg, about 41 μg, about 42 μg, about 43 μg, about 44 μg, about 45 μg, about 46 μg, about 47 μg, about 48 μg, about 49 μg, about 50 μg, about 51 μg, about 52 μg, about 53 μg, about 54 μg, about 55 μg, about 56 μg, about 57 μg, about 58 μg, about 59 μg, about 60 μg, about 61 μg, about 62 μg, about 63 μg, about 64 μg, about 65 μg, about 66 μg, about 67 μg, about 68 μg, about 69 μg, about 70 μg, about 71 μg, about 72 μg, about 73 μg, about 74 μg, about 75 μg, about 76 μg, about 77 μg, about 78 μg, about 79 μg, about 80 μg, about 81 μg, about 82 μg, about 83 μg, about 84 μg, about 85 μg, about 86 μg, about 87 μg, about 88 μg, about 89 μg, about 90 μg, about 91 μg, about 92 μg, about 93 μg, about 94 μg, about 95 μg, about 96 μg, about 97 μg, about 98 μg, about 99 μg, about 100 μg, about 101 μg, about 102 μg, about 103 μg, about 104 μg, about 105 μg, about 106 μg, about 107 μg, about 108 μg, about 109 μg, about 110 μg, about 111 μg, about 112 μg, about 113 μg, about 114 μg, about 115 μg, about 116 μg, about 117 μg, about 118 μg, about 119 μg, about 120 μg, about 121 μg, about 122 μg, about 123 μg, about 124 μg, about 125 μg, about 126 μg, about 127 μg, about 128 μg, about 129 μg, about 130 μg, about 131 μg, about 132 μg, about 133 μg, about 134 μg, about 135 μg, about 136 μg, about 137 μg, about 138 μg, about 139 μg, about 140 μg, about 141 μg, about 142 μg, about 143 μg, about 144 μg, about 145 μg, about 146 μg, about 147 μg, about 148 μg, about 149 μg, about 150 μg, about 151 μg, about 152 μg, about 153 μg, about 154 μg, about 155 μg, about 156 μg, about 157 μg, about 158 μg, about 159 μg, about 160 μg, about 161 μg, about 162 μg, about 163 μg, about 164 μg, about 165 μg, about 166 μg, about 167 μg, about 168 μg, about 169 μg, about 170 μg, about 171 μg, about 172 μg, about 173 μg, about 174 μg, about 175 μg, about 176 μg, about 177 μg, about 178 μg, about 179 μg, about 180 μg, about 181 μg, about 182 μg, about 183 μg, about 184 μg, about 185 μg, about 186 μg, about 187 μg, about 188 μg, about 189 μg, about 190 μg, about 191 μg, about 192 μg, about 193 μg, about 194 μg, about 195 μg, about 196 μg, about 197 μg, about 198 μg, about 199 μg, about 200 μg, about 201 μg, about 202 μg, about 203 μg, about 204 μg, about 205 μg, about 206 μg, about 207 μg, about 208 μg, about 209 μg, about 210 μg, about 211 μg, about 212 μg, about 213 μg, about 214 μg, about 215 μg, about 216 μg, about 217 μg, about 218 μg, about 219 μg, about 220 μg, about 221 μg, about 222 μg, about 223 μg, about 224 μg, about 225 μg, about 226 μg, about 227 μg, about 228 μg, about 229 μg, about 230 μg, about 231 μg, about 232 μg, about 233 μg, about 234 μg, about 235 μg, about 236 μg, about 237 μg, about 238 μg, about 239 μg, about 240 μg, about 241 μg, about 242 μg, about 243 μg, about 244 μg, about 245 μg, about 246 μg, about 247 μg, about 248 μg, about 249 μg, about 250 μg, about 251 μg, about 252 μg, about 253 μg, about 254 μg, about 255 μg, about 256 μg, about 257 μg, about 258 μg, about 259 μg, about 260 μg, about 261 μg, about 262 μg, about 263 μg, about 264 μg, about 265 μg, about 266 μg, about 267 μg, about 268 μg, about 269 μg, about 270 μg, about 271 μg, about 272 μg, about 273 μg, about 274 μg, about 275 μg, about 276 μg, about 277 μg, about 278 μg, about 279 μg, about 280 μg, about 281 μg, about 282 μg, about 283 μg, about 284 μg, about 285 μg, about 286 μg, about 287 μg, about 288 μg, about 289 μg, about 290 μg, about 291 μg, about 292 μg, about 293 μg, about 294 μg, about 295 μg, about 296 μg, about 297 μg, about 298 μg, about 299 μg, about 300 μg, about 301 μg, about 302 μg, about 303 μg, about 304 μg, about 305 μg, about 306 μg, about 307 μg, about 308 μg, about 309 μg, about 310 μg, about 311 μg, about 312 μg, about 313 μg, about 314 μg, about 315 μg, about 316 μg, about 317 μg, about 318 μg, about 319 μg, about 320 μg, about 321 μg, about 322 μg, about 323 μg, about 324 μg, about 325 μg, about 326 μg, about 327 μg, about 328 μg, about 329 μg, about 330 μg, about 331 μg, about 332 μg, about 333 μg, about 334 μg, about 335 μg, about 336 μg, about 337 μg, about 338 μg, about 339 μg, about 340 μg, about 341 μg, about 342 μg, about 343 μg, about 344 μg, about 345 μg, about 346 μg, about 347 μg, about 348 μg, about 349 μg, about 350 μg, about 351 μg, about 352 μg, about 353 μg, about 354 μg, about 355 μg, about 356 μg, about 357 μg, about 358 μg, about 359 μg, about 360 μg, about 361 μg, about 362 μg, about 363 μg, about 364 μg, about 365 μg, about 366 μg, about 367 μg, about 368 μg, about 369 μg, about 370 μg, about 371 μg, about 372 μg, about 373 μg, about 374 μg, about 375 μg, about 376 μg, about 377 μg, about 378 μg, about 379 μg, about 380 μg, about 381 μg, about 382 μg, about 383 μg, about 384 μg, about 385 μg, about 386 μg, about 387 μg, about 388 μg, about 389 μg, about 390 μg, about 391 μg, about 392 μg, about 393 μg, about 394 μg, about 395 μg, about 396 μg, about 397 μg, about 398 μg, about 399 μg, or about 400 μg of each viral glycoprotein.

[0251] In embodiments, the immunogenic compositions comprise about 1 μg of each viral glycoprotein. In embodiments, the immunogenic compositions comprise about 5 μg of each viral glycoprotein. In embodiments, the immunogenic compositions comprise about 25 μg of each viral glycoprotein. In embodiments, the immunogenic compositions comprise about 60 μg of each viral glycoprotein. In embodiments, the immunogenic compositions comprise about 240 μg of each viral glycoprotein.

[0252] In embodiments, the immunogenic compositions described herein comprise from about 1 μg to about 100 μg of each CoV S glycoprotein. In embodiments, the immunogenic compositions described herein comprise from about 2.5 μg to about 35 μg of each CoV S glycoprotein. In embodiments, the immunogenic compositions described herein comprise from about 5 μg to about 25 μg of each CoV S glycoprotein. In embodiments, the immunogenic compositions described herein comprise from about 14 μg to about 15 μg of each CoV S glycoprotein. In embodiments, the immunogenic compositions described herein comprise from about 15 μg to about 35 μg of each CoV S glycoprotein. In embodiments, the immunogenic compositions described herein comprise from about 1 μg to about 100 μg of total CoV S glycoproteins. In embodiments, the immunogenic compositions comprise about 1 μg, about 2 μg, about 3 μg, about 4 μg, about 5 μg, about 6 μg, about 7 μg, about 8 μg, about 9 μg, about 10 μg, about 11 μg, about 12 μg, about 13 μg, about 14 μg, about 15 μg, about 16 μg, about 17 μg, about 18 μg, about 19 μg, about 20 μg, about 21 μg, about 22 μg, about 23 μg, about 24 μg, about 25 μg, about 26 μg, about 27 μg, about 28 μg, about 29 μg, about 30 μg, about 31 μg, about 32 μg, about 33 μg, about 34 μg, about 35 μg, about 36 μg, about 37 μg, about 38 μg, about 39 μg, about 40 μg, about 41 μg, about 42 μg, about 43 μg, about 44 μg, about 45 μg, about 46 μg, about 47 μg, about 48 μg, about 49 μg, about 50 μg, about 51 μg, about 52 μg, about 53 μg, about 54 μg, about 55 μg, about 56 μg, about 57 μg, about 58 μg, about 59 μg, about 60 μg, about 61 μg, about 62 μg, about 63 μg, about 64 μg, about 65 μg, about 66 μg, about 67 μg, about 68 μg, about 69 μg, about 70 μg, about 71 μg, about 72 μg, about 73 μg, about 74 μg, about 75 μg, about 76 μg, about 77 μg, about 78 μg, about 79 μg, about 80 μg, about 81 μg, about 82 μg, about 83 μg, about 84 μg, about 85 μg, about 86 μg, about 87 μg, about 88 μg, about 89 μg, about 90 μg, about 91 μg, about 92 μg, about 93 μg, about 94 μg, about 95 μg, about 96 μg, about 97 μg, about 98 μg, about 99 μg, about 100 μg, including all values and ranges therebetween, of each CoV S glycoprotein. In embodiments, the immunogenic compositions comprise about 1 μg, about 2 μg, about 3 μg, about 4 μg, about 5 μg, about 6 μg, about 7 μg, about 8 μg, about 9 μg, about 10 μg, about 11 μg, about 12 μg, about 13 μg, about 14 μg, about 15 μg, about 16 μg, about 17 μg, about 18 μg, about 19 μg, about 20 μg, about 21 μg, about 22 μg, about 23 μg, about 24 μg, about 25 μg, about 26 μg, about 27 μg, about 28 μg, about 29 μg, about 30 μg, about 31 μg, about 32 μg, about 33 μg, about 34 μg, about 35 μg, about 36 μg, about 37 μg, about 38 μg, about 39 μg, about 40 μg, about 41 μg, about 42 μg, about 43 μg, about 44 μg, about 45 μg, about 46 μg, about 47 μg, about 48 μg, about 49 μg, about 50 μg, about 51 μg, about 52 μg, about 53 μg, about 54 μg, about 55 μg, about 56 μg, about 57 μg, about 58 μg, about 59 μg, about 60 μg, about 61 μg, about 62 μg, about 63 μg, about 64 μg, about 65 μg, about 66 μg, about 67 μg, about 68 μg, about 69 μg, about 70 μg, about 71 μg, about 72 μg, about 73 μg, about 74 μg, about 75 μg, about 76 μg, about 77 μg, about 78 μg, about 79 μg, about 80 μg, about 81 μg, about 82 μg, about 83 μg, about 84 μg, about 85 μg, about 86 μg, about 87 μg, about 88 μg, about 89 μg, about 90 μg, about 91 μg, about 92 μg, about 93 μg, about 94 μg, about 95 μg, about 96 μg, about 97 μg, about 98 μg, about 99 μg, about 100 μg of total CoV S glycoproteins, including all values and ranges therebetween. In embodiments, the immunogenic compositions comprise about 1 μg of a CoV S glycoprotein. In embodiments, the immunogenic compositions comprise about 13 μg of a CoV S glycoprotein. In embodiments, the immunogenic compositions comprise about 5 μg of a CoV S glycoprotein. In embodiments, the immunogenic compositions comprise about 25 μg of a CoV S glycoprotein.

[0253] In embodiments, the immunogenic compositions described herein comprise from about 1 μg to about 300 μg of each HA glycoprotein. In embodiments, the immunogenic compositions described herein comprise from about 5 μg to about 60 μg of each HA glycoprotein. In embodiments, the immunogenic compositions described herein comprise from about 24 μg to about 40 μg of each HA glycoprotein. In embodiments, the immunogenic compositions described herein comprise from about 30 μg to about 40 μg of each HA glycoprotein. In embodiments, the immunogenic compositions described herein comprise from about 30 μg to about 60 μg of each HA glycoprotein. In embodiments, the immunogenic compositions described herein comprise from about 33 μg to about 39 μg of each HA glycoprotein. In embodiments, the immunogenic compositions described herein comprise from about 20 μg to about 240 μg of each HA glycoprotein. In embodiments, the immunogenic compositions described herein comprise from about 30 μg to about 60 μg of each HA glycoprotein. In embodiments, the immunogenic compositions described herein comprise from about 24 μg to about 40 μg of each HA glycoprotein. In embodiments, the immunogenic compositions comprise about 1 μg, about 2 μg, about 3 μg, about 4 μg, about 5 μg, about 6 μg, about 7 μg, about 8 μg, about 9 μg, about 10 μg, about 11 μg, about 12 μg, about 13 μg, about 14 μg, about 15 μg, about 16 μg, about 17 μg, about 18 μg, about 19 μg, about 20 μg, about 21 μg, about 22 μg, about 23 μg, about 24 μg, about 25 μg, about 26 μg, about 27 μg, about 28 μg, about 29 μg, about 30 μg, about 31 μg, about 32 μg, about 33 μg, about 34 μg, about 35 μg, about 36 μg, about 37 μg, about 38 μg, about 39 μg, about 40 μg, about 41 μg, about 42 μg, about 43 μg, about 44 μg, about 45 μg, about 46 μg, about 47 μg, about 48 μg, about 49 μg, about 50 μg, about 51 μg, about 52 μg, about 53 μg, about 54 μg, about 55 μg, about 56 μg, about 57 μg, about 58 μg, about 59 μg, about 60 μg, about 61 μg, about 62 μg, about 63 μg, about 64 μg, about 65 μg, about 66 μg, about 67 μg, about 68 μg, about 69 μg, about 70 μg, about 71 μg, about 72 μg, about 73 μg, about 74 μg, about 75 μg, about 76 μg, about 77 μg, about 78 μg, about 79 μg, about 80 μg, about 81 μg, about 82 μg, about 83 μg, about 84 μg, about 85 μg, about 86 μg, about 87 μg, about 88 μg, about 89 μg, about 90 μg, about 91 μg, about 92 μg, about 93 μg, about 94 μg, about 95 μg, about 96 μg, about 97 μg, about 98 μg, about 99 μg, about 100 μg, about 101 μg, about 102 μg, about 103 μg, about 104 μg, about 105 μg, about 106 μg, about 107 μg, about 108 μg, about 109 μg, about 110 μg, about 111 μg, about 112 μg, about 113 μg, about 114 μg, about 115 μg, about 116 μg, about 117 μg, about 118 μg, about 119 μg, about 120 μg, about 121 μg, about 122 μg, about 123 μg, about 124 μg, about 125 μg, about 126 μg, about 127 μg, about 128 μg, about 129 μg, about 130 μg, about 131 μg, about 132 μg, about 133 μg, about 134 μg, about 135 μg, about 136 μg, about 137 μg, about 138 μg, about 139 μg, about 140 μg, about 141 μg, about 142 μg, about 143 μg, about 144 μg, about 145 μg, about 146 μg, about 147 μg, about 148 μg, about 149 μg, about 150 μg, about 151 μg, about 152 μg, about 153 μg, about 154 μg, about 155 μg, about 156 μg, about 157 μg, about 158 μg, about 159 μg, about 160 μg, about 161 μg, about 162 μg, about 163 μg, about 164 μg, about 165 μg, about 166 μg, about 167 μg, about 168 μg, about 169 μg, about 170 μg, about 171 μg, about 172 μg, about 173 μg, about 174 μg, about 175 μg, about 176 μg, about 177 μg, about 178 μg, about 179 μg, about 180 μg, about 181 μg, about 182 μg, about 183 μg, about 184 μg, about 185 μg, about 186 μg, about 187 μg, about 188 μg, about 189 μg, about 190 μg, about 191 μg, about 192 μg, about 193 μg, about 194 μg, about 195 μg, about 196 μg, about 197 μg, about 198 μg, about 199 μg, about 200 μg, about 201 μg, about 202 μg, about 203 μg, about 204 μg, about 205 μg, about 206 μg, about 207 μg, about 208 μg, about 209 μg, about 210 μg, about 211 μg, about 212 μg, about 213 μg, about 214 μg, about 215 μg, about 216 μg, about 217 μg, about 218 μg, about 219 μg, about 220 μg, about 221 μg, about 222 μg, about 223 μg, about 224 μg, about 225 μg, about 226 μg, about 227 μg, about 228 μg, about 229 μg, about 230 μg, about 231 μg, about 232 μg, about 233 μg, about 234 μg, about 235 μg, about 236 μg, about 237 μg, about 238 μg, about 239 μg, about 240 μg, about 241 μg, about 242 μg, about 243 μg, about 244 μg, about 245 μg, about 246 μg, about 247 μg, about 248 μg, about 249 μg, about 250 μg, about 251 μg, about 252 μg, about 253 μg, about 254 μg, about 255 μg, about 256 μg, about 257 μg, about 258 μg, about 259 μg, about 260 μg, about 261 μg, about 262 μg, about 263 μg, about 264 μg, about 265 μg, about 266 μg, about 267 μg, about 268 μg, about 269 μg, about 270 μg, about 271 μg, about 272 μg, about 273 μg, about 274 μg, about 275 μg, about 276 μg, about 277 μg, about 278 μg, about 279 μg, about 280 μg, about 281 μg, about 282 μg, about 283 μg, about 284 μg, about 285 μg, about 286 μg, about 287 μg, about 288 μg, about 289 μg, about 290 μg, about 291 μg, about 292 μg, about 293 μg, about 294 μg, about 295 μg, about 296 μg, about 297 μg, about 298 μg, about 299 μg, or about 300 μg of each HA glycoprotein, including all values and ranges therebetween. In embodiments, the immunogenic compositions described herein comprise about 30 μg of each HA glycoprotein. In embodiments, the immunogenic compositions described herein comprise about 33 μg of each HA glycoprotein. In embodiments, the immunogenic compositions described herein comprise about 39 μg of each HA glycoprotein. In embodiments, the immunogenic compositions described herein comprise about 54 μg of each HA glycoprotein. In embodiments, the immunogenic compositions described herein comprise about 60 μg of each HA glycoprotein. In embodiments, the immunogenic compositions described herein comprise about 240 μg of each HA glycoprotein.

[0254] In embodiments, the immunogenic compositions described herein comprise from about 1 μg to about 1000 μg of total HA glycoproteins. In embodiments, the immunogenic compositions comprise about 1 μg, about 2 μg, about 3 μg, about 4 μg, about 5 μg, about 6 μg, about 7 μg, about 8 μg, about 9 μg, about 10 μg, about 11 μg, about 12 μg, about 13 μg, about 14 μg, about 15 μg, about 16 μg, about 17 μg, about 18 μg, about 19 μg, about 20 μg, about 21 μg, about 22 μg, about 23 μg, about 24 μg, about 25 μg, about 26 μg, about 27 μg, about 28 μg, about 29 μg, about 30 μg, about 31 μg, about 32 μg, about 33 μg, about 34 μg, about 35 μg, about 36 μg, about 37 μg, about 38 μg, about 39 μg, about 40 μg, about 41 μg, about 42 μg, about 43 μg, about 44 μg, about 45 μg, about 46 μg, about 47 μg, about 48 μg, about 49 μg, about 50 μg, about 51 μg, about 52 μg, about 53 μg, about 54 μg, about 55 μg, about 56 μg, about 57 μg, about 58 μg, about 59 μg, about 60 μg, about 61 μg, about 62 μg, about 63 μg, about 64 μg, about 65 μg, about 66 μg, about 67 μg, about 68 μg, about 69 μg, about 70 μg, about 71 μg, about 72 μg, about 73 μg, about 74 μg, about 75 μg, about 76 μg, about 77 μg, about 78 μg, about 79 μg, about 80 μg, about 81 μg, about 82 μg, about 83 μg, about 84 μg, about 85 μg, about 86 μg, about 87 μg, about 88 μg, about 89 μg, about 90 μg, about 91 μg, about 92 μg, about 93 μg, about 94 μg, about 95 μg, about 96 μg, about 97 μg, about 98 μg, about 99 μg, about 100 μg, about 101 μg, about 102 μg, about 103 μg, about 104 μg, about 105 μg, about 106 μg, about 107 μg, about 108 μg, about 109 μg, about 110 μg, about 111 μg, about 112 μg, about 113 μg, about 114 μg, about 115 μg, about 116 μg, about 117 μg, about 118 μg, about 119 μg, about 120 μg, about 121 μg, about 122 μg, about 123 μg, about 124 μg, about 125 μg, about 126 μg, about 127 μg, about 128 μg, about 129 μg, about 130 μg, about 131 μg, about 132 μg, about 133 μg, about 134 μg, about 135 μg, about 136 μg, about 137 μg, about 138 μg, about 139 μg, about 140 μg, about 141 μg, about 142 μg, about 143 μg, about 144 μg, about 145 μg, about 146 μg, about 147 μg, about 148 μg, about 149 μg, about 150 μg, about 151 μg, about 152 μg, about 153 μg, about 154 μg, about 155 μg, about 156 μg, about 157 μg, about 158 μg, about 159 μg, about 160 μg, about 161 μg, about 162 μg, about 163 μg, about 164 μg, about 165 μg, about 166 μg, about 167 μg, about 168 μg, about 169 μg, about 170 μg, about 171 μg, about 172 μg, about 173 μg, about 174 μg, about 175 μg, about 176 μg, about 177 μg, about 178 μg, about 179 μg, about 180 μg, about 181 μg, about 182 μg, about 183 μg, about 184 μg, about 185 μg, about 186 μg, about 187 μg, about 188 μg, about 189 μg, about 190 μg, about 191 μg, about 192 μg, about 193 μg, about 194 μg, about 195 μg, about 196 μg, about 197 μg, about 198 μg, about 199 μg, about 200 μg, about 201 μg, about 202 μg, about 203 μg, about 204 μg, about 205 μg, about 206 μg, about 207 μg, about 208 μg, about 209 μg, about 210 μg, about 211 μg, about 212 μg, about 213 μg, about 214 μg, about 215 μg, about 216 μg, about 217 μg, about 218 μg, about 219 μg, about 220 μg, about 221 μg, about 222 μg, about 223 μg, about 224 μg, about 225 μg, about 226 μg, about 227 μg, about 228 μg, about 229 μg, about 230 μg, about 231 μg, about 232 μg, about 233 μg, about 234 μg, about 235 μg, about 236 μg, about 237 μg, about 238 μg, about 239 μg, about 240 μg, about 241 μg, about 242 μg, about 243 μg, about 244 μg, about 245 μg, about 246 μg, about 247 μg, about 248 μg, about 249 μg, about 250 μg, about 251 μg, about 252 μg, about 253 μg, about 254 μg, about 255 μg, about 256 μg, about 257 μg, about 258 μg, about 259 μg, about 260 μg, about 261 μg, about 262 μg, about 263 μg, about 264 μg, about 265 μg, about 266 μg, about 267 μg, about 268 μg, about 269 μg, about 270 μg, about 271 μg, about 272 μg, about 273 μg, about 274 μg, about 275 μg, about 276 μg, about 277 μg, about 278 μg, about 279 μg, about 280 μg, about 281 μg, about 282 μg, about 283 μg, about 284 μg, about 285 μg, about 286 μg, about 287 μg, about 288 μg, about 289 μg, about 290 μg, about 291 μg, about 292 μg, about 293 μg, about 294 μg, about 295 μg, about 296 μg, about 297 μg, about 298 μg, about 299 μg, about 300 μg, about 301 μg, about 302 μg, about 303 μg, about 304 μg, about 305 μg, about 306 μg, about 307 μg, about 308 μg, about 309 μg, about 310 μg, about 311 μg, about 312 μg, about 313 μg, about 314 μg, about 315 μg, about 316 μg, about 317 μg, about 318 μg, about 319 μg, about 320 μg, about 321 μg, about 322 μg, about 323 μg, about 324 μg, about 325 μg, about 326 μg, about 327 μg, about 328 μg, about 329 μg, about 330 μg, about 331 μg, about 332 μg, about 333 μg, about 334 μg, about 335 μg, about 336 μg, about 337 μg, about 338 μg, about 339 μg, about 340 μg, about 341 μg, about 342 μg, about 343 μg, about 344 μg, about 345 μg, about 346 μg, about 347 μg, about 348 μg, about 349 μg, about 350 μg, about 351 μg, about 352 μg, about 353 μg, about 354 μg, about 355 μg, about 356 μg, about 357 μg, about 358 μg, about 359 μg, about 360 μg, about 361 μg, about 362 μg, about 363 μg, about 364 μg, about 365 μg, about 366 μg, about 367 μg, about 368 μg, about 369 μg, about 370 μg, about 371 μg, about 372 μg, about 373 μg, about 374 μg, about 375 μg, about 376 μg, about 377 μg, about 378 μg, about 379 μg, about 380 μg, about 381 μg, about 382 μg, about 383 μg, about 384 μg, about 385 μg, about 386 μg, about 387 μg, about 388 μg, about 389 μg, about 390 μg, about 391 μg, about 392 μg, about 393 μg, about 394 μg, about 395 μg, about 396 μg, about 397 μg, about 398 μg, about 399 μg, about 400 μg, about 401 μg, about 402 μg, about 403 μg, about 404 μg, about 405 μg, about 406 μg, about 407 μg, about 408 μg, about 409 μg, about 410 μg, about 411 μg, about 412 μg, about 413 μg, about 414 μg, about 415 μg, about 416 μg, about 417 μg, about 418 μg, about 419 μg, about 420 μg, about 421 μg, about 422 μg, about 423 μg, about 424 μg, about 425 μg, about 426 μg, about 427 μg, about 428 μg, about 429 μg, about 430 μg, about 431 μg, about 432 μg, about 433 μg, about 434 μg, about 435 μg, about 436 μg, about 437 μg, about 438 μg, about 439 μg, about 440 μg, about 441 μg, about 442 μg, about 443 μg, about 444 μg, about 445 μg, about 446 μg, about 447 μg, about 448 μg, about 449 μg, about 450 μg, about 451 μg, about 452 μg, about 453 μg, about 454 μg, about 455 μg, about 456 μg, about 457 μg, about 458 μg, about 459 μg, about 460 μg, about 461 μg, about 462 μg, about 463 μg, about 464 μg, about 465 μg, about 466 μg, about 467 μg, about 468 μg, about 469 μg, about 470 μg, about 471 μg, about 472 μg, about 473 μg, about 474 μg, about 475 μg, about 476 μg, about 477 μg, about 478 μg, about 479 μg, about 480 μg, about 481 μg, about 482 μg, about 483 μg, about 484 μg, about 485 μg, about 486 μg, about 487 μg, about 488 μg, about 489 μg, about 490 μg, about 491 μg, about 492 μg, about 493 μg, about 494 μg, about 495 μg, about 496 μg, about 497 μg, about 498 μg, about 499 μg, about 500 μg, about 501 μg, about 502 μg, about 503 μg, about 504 μg, about 505 μg, about 506 μg, about 507 μg, about 508 μg, about 509 μg, about 510 μg, about 511 μg, about 512 μg, about 513 μg, about 514 μg, about 515 μg, about 516 μg, about 517 μg, about 518 μg, about 519 μg, about 520 μg, about 521 μg, about 522 μg, about 523 μg, about 524 μg, about 525 μg, about 526 μg, about 527 μg, about 528 μg, about 529 μg, about 530 μg, about 531 μg, about 532 μg, about 533 μg, about 534 μg, about 535 μg, about 536 μg, about 537 μg, about 538 μg, about 539 μg, about 540 μg, about 541 μg, about 542 μg, about 543 μg, about 544 μg, about 545 μg, about 546 μg, about 547 μg, about 548 μg, about 549 μg, about 550 μg, about 551 μg, about 552 μg, about 553 μg, about 554 μg, about 555 μg, about 556 μg, about 557 μg, about 558 μg, about 559 μg, about 560 μg, about 561 μg, about 562 μg, about 563 μg, about 564 μg, about 565 μg, about 566 μg, about 567 μg, about 568 μg, about 569 μg, about 570 μg, about 571 μg, about 572 μg, about 573 μg, about 574 μg, about 575 μg, about 576 μg, about 577 μg, about 578 μg, about 579 μg, about 580 μg, about 581 μg, about 582 μg, about 583 μg, about 584 μg, about 585 μg, about 586 μg, about 587 μg, about 588 μg, about 589 μg, about 590 μg, about 591 μg, about 592 μg, about 593 μg, about 594 μg, about 595 μg, about 596 μg, about 597 μg, about 598 μg, about 599 μg, about 600 μg, about 601 μg, about 602 μg, about 603 μg, about 604 μg, about 605 μg, about 606 μg, about 607 μg, about 608 μg, about 609 μg, about 610 μg, about 611 μg, about 612 μg, about 613 μg, about 614 μg, about 615 μg, about 616 μg, about 617 μg, about 618 μg, about 619 μg, about 620 μg, about 621 μg, about 622 μg, about 623 μg, about 624 μg, about 625 μg, about 626 μg, about 627 μg, about 628 μg, about 629 μg, about 630 μg, about 631 μg, about 632 μg, about 633 μg, about 634 μg, about 635 μg, about 636 μg, about 637 μg, about 638 μg, about 639 μg, about 640 μg, about 641 μg, about 642 μg, about 643 μg, about 644 μg, about 645 μg, about 646 μg, about 647 μg, about 648 μg, about 649 μg, about 650 μg, about 651 μg, about 652 μg, about 653 μg, about 654 μg, about 655 μg, about 656 μg, about 657 μg, about 658 μg, about 659 μg, about 660 μg, about 661 μg, about 662 μg, about 663 μg, about 664 μg, about 665 μg, about 666 μg, about 667 μg, about 668 μg, about 669 μg, about 670 μg, about 671 μg, about 672 μg, about 673 μg, about 674 μg, about 675 μg, about 676 μg, about 677 μg, about 678 μg, about 679 μg, about 680 μg, about 681 μg, about 682 μg, about 683 μg, about 684 μg, about 685 μg, about 686 μg, about 687 μg, about 688 μg, about 689 μg, about 690 μg, about 691 μg, about 692 μg, about 693 μg, about 694 μg, about 695 μg, about 696 μg, about 697 μg, about 698 μg, about 699 μg, about 700 μg, about 701 μg, about 702 μg, about 703 μg, about 704 μg, about 705 μg, about 706 μg, about 707 μg, about 708 μg, about 709 μg, about 710 μg, about 711 μg, about 712 μg, about 713 μg, about 714 μg, about 715 μg, about 716 μg, about 717 μg, about 718 μg, about 719 μg, about 720 μg, about 721 μg, about 722 μg, about 723 μg, about 724 μg, about 725 μg, about 726 μg, about 727 μg, about 728 μg, about 729 μg, about 730 μg, about 731 μg, about 732 μg, about 733 μg, about 734 μg, about 735 μg, about 736 μg, about 737 μg, about 738 μg, about 739 μg, about 740 μg, about 741 μg, about 742 μg, about 743 μg, about 744 μg, about 745 μg, about 746 μg, about 747 μg, about 748 μg, about 749 μg, about 750 μg, about 751 μg, about 752 μg, about 753 μg, about 754 μg, about 755 μg, about 756 μg, about 757 μg, about 758 μg, about 759 μg, about 760 μg, about 761 μg, about 762 μg, about 763 μg, about 764 μg, about 765 μg, about 766 μg, about 767 μg, about 768 μg, about 769 μg, about 770 μg, about 771 μg, about 772 μg, about 773 μg, about 774 μg, about 775 μg, about 776 μg, about 777 μg, about 778 μg, about 779 μg, about 780 μg, about 781 μg, about 782 μg, about 783 μg, about 784 μg, about 785 μg, about 786 μg, about 787 μg, about 788 μg, about 789 μg, about 790 μg, about 791 μg, about 792 μg, about 793 μg, about 794 μg, about 795 μg, about 796 μg, about 797 μg, about 798 μg, about 799 μg, about 800 μg, about 801 μg, about 802 μg, about 803 μg, about 804 μg, about 805 μg, about 806 μg, about 807 μg, about 808 μg, about 809 μg, about 810 μg, about 811 μg, about 812 μg, about 813 μg, about 814 μg, about 815 μg, about 816 μg, about 817 μg, about 818 μg, about 819 μg, about 820 μg, about 821 μg, about 822 μg, about 823 μg, about 824 μg, about 825 μg, about 826 μg, about 827 μg, about 828 μg, about 829 μg, about 830 μg, about 831 μg, about 832 μg, about 833 μg, about 834 μg, about 835 μg, about 836 μg, about 837 μg, about 838 μg, about 839 μg, about 840 μg, about 841 μg, about 842 μg, about 843 μg, about 844 μg, about 845 μg, about 846 μg, about 847 μg, about 848 μg, about 849 μg, about 850 μg, about 851 μg, about 852 μg, about 853 μg, about 854 μg, about 855 μg, about 856 μg, about 857 μg, about 858 μg, about 859 μg, about 860 μg, about 861 μg, about 862 μg, about 863 μg, about 864 μg, about 865 μg, about 866 μg, about 867 μg, about 868 μg, about 869 μg, about 870 μg, about 871 μg, about 872 μg, about 873 μg, about 874 μg, about 875 μg, about 876 μg, about 877 μg, about 878 μg, about 879 μg, about 880 μg, about 881 μg, about 882 μg, about 883 μg, about 884 μg, about 885 μg, about 886 μg, about 887 μg, about 888 μg, about 889 μg, about 890 μg, about 891 μg, about 892 μg, about 893 μg, about 894 μg, about 895 μg, about 896 μg, about 897 μg, about 898 μg, about 899 μg, about 900 μg, about 901 μg, about 902 μg, about 903 μg, about 904 μg, about 905 μg, about 906 μg, about 907 μg, about 908 μg, about 909 μg, about 910 μg, about 911 μg, about 912 μg, about 913 μg, about 914 μg, about 915 μg, about 916 μg, about 917 μg, about 918 μg, about 919 μg, about 920 μg, about 921 μg, about 922 μg, about 923 μg, about 924 μg, about 925 μg, about 926 μg, about 927 μg, about 928 μg, about 929 μg, about 930 μg, about 931 μg, about 932 μg, about 933 μg, about 934 μg, about 935 μg, about 936 μg, about 937 μg, about 938 μg, about 939 μg, about 940 μg, about 941 μg, about 942 μg, about 943 μg, about 944 μg, about 945 μg, about 946 μg, about 947 μg, about 948 μg, about 949 μg, about 950 μg, about 951 μg, about 952 μg, about 953 μg, about 954 μg, about 955 μg, about 956 μg, about 957 μg, about 958 μg, about 959 μg, about 960 μg, about 961 μg, about 962 μg, about 963 μg, about 964 μg, about 965 μg, about 966 μg, about 967 μg, about 968 μg, about 969 μg, about 970 μg, about 971 μg, about 972 μg, about 973 μg, about 974 μg, about 975 μg, about 976 μg, about 977 μg, about 978 μg, about 979 μg, about 980 μg, about 981 μg, about 982 μg, about 983 μg, about 984 μg, about 985 μg, about 986 μg, about 987 μg, about 988 μg, about 989 μg, about 990 μg, about 991 μg, about 992 μg, about 993 μg, about 994 μg, about 995 μg, about 996 μg, about 997 μg, about 998 μg, about 999 μg, about 1000 μg, of total HA glycoproteins, including all values and ranges therebetween.

[0255] In embodiments, the immunogenic compositions described herein comprise from about 1 μg to about 300 μg of each RSV F glycoprotein. In embodiments, the immunogenic compositions described herein comprise from about 5 μg to about 60 μg of each RSV F glycoprotein. In embodiments, the immunogenic compositions described herein comprise from about 24 μg to about 40 μg of each RSV F glycoprotein. In embodiments, the immunogenic compositions described herein comprise from about 30 μg to about 40 μg of each RSV F glycoprotein. In embodiments, the immunogenic compositions described herein comprise from about 30 μg to about 60 μg of each RSV F glycoprotein. In embodiments, the immunogenic compositions described herein comprise from about 33 μg to about 39 μg of each RSV F glycoprotein. In embodiments, the immunogenic compositions described herein comprise from about 20 μg to about 240 μg of each RSV F glycoprotein. In embodiments, the immunogenic compositions described herein comprise from about 30 μg to about 60 μg of each RSV F glycoprotein. In embodiments, the immunogenic compositions described herein comprise from about 24 μg to about 40 μg of each RSV F glycoprotein. In embodiments, the immunogenic compositions comprise about 1 μg, about 2 μg, about 3 μg, about 4 μg, about 5 μg, about 6 μg, about 7 μg, about 8 μg, about 9 μg, about 10 μg, about 11 μg, about 12 μg, about 13 μg, about 14 μg, about 15 μg, about 16 μg, about 17 μg, about 18 μg, about 19 μg, about 20 μg, about 21 μg, about 22 μg, about 23 μg, about 24 μg, about 25 μg, about 26 μg, about 27 μg, about 28 μg, about 29 μg, about 30 μg, about 31 μg, about 32 μg, about 33 μg, about 34 μg, about 35 μg, about 36 μg, about 37 μg, about 38 μg, about 39 μg, about 40 μg, about 41 μg, about 42 μg, about 43 μg, about 44 μg, about 45 μg, about 46 μg, about 47 μg, about 48 μg, about 49 μg, about 50 μg, about 51 μg, about 52 μg, about 53 μg, about 54 μg, about 55 μg, about 56 μg, about 57 μg, about 58 μg, about 59 μg, about 60 μg, about 61 μg, about 62 μg, about 63 μg, about 64 μg, about 65 μg, about 66 μg, about 67 μg, about 68 μg, about 69 μg, about 70 μg, about 71 μg, about 72 μg, about 73 μg, about 74 μg, about 75 μg, about 76 μg, about 77 μg, about 78 μg, about 79 μg, about 80 μg, about 81 μg, about 82 μg, about 83 μg, about 84 μg, about 85 μg, about 86 μg, about 87 μg, about 88 μg, about 89 μg, about 90 μg, about 91 μg, about 92 μg, about 93 μg, about 94 μg, about 95 μg, about 96 μg, about 97 μg, about 98 μg, about 99 μg, about 100 μg, about 101 μg, about 102 μg, about 103 μg, about 104 μg, about 105 μg, about 106 μg, about 107 μg, about 108 μg, about 109 μg, about 110 μg, about 111 μg, about 112 μg, about 113 μg, about 114 μg, about 115 μg, about 116 μg, about 117 μg, about 118 μg, about 119 μg, about 120 μg, about 121 μg, about 122 μg, about 123 μg, about 124 μg, about 125 μg, about 126 μg, about 127 μg, about 128 μg, about 129 μg, about 130 μg, about 131 μg, about 132 μg, about 133 μg, about 134 μg, about 135 μg, about 136 μg, about 137 μg, about 138 μg, about 139 μg, about 140 μg, about 141 μg, about 142 μg, about 143 μg, about 144 μg, about 145 μg, about 146 μg, about 147 μg, about 148 μg, about 149 μg, about 150 μg, about 151 μg, about 152 μg, about 153 μg, about 154 μg, about 155 μg, about 156 μg, about 157 μg, about 158 μg, about 159 μg, about 160 μg, about 161 μg, about 162 μg, about 163 μg, about 164 μg, about 165 μg, about 166 μg, about 167 μg, about 168 μg, about 169 μg, about 170 μg, about 171 μg, about 172 μg, about 173 μg, about 174 μg, about 175 μg, about 176 μg, about 177 μg, about 178 μg, about 179 μg, about 180 μg, about 181 μg, about 182 μg, about 183 μg, about 184 μg, about 185 μg, about 186 μg, about 187 μg, about 188 μg, about 189 μg, about 190 μg, about 191 μg, about 192 μg, about 193 μg, about 194 μg, about 195 μg, about 196 μg, about 197 μg, about 198 μg, about 199 μg, about 200 μg, about 201 μg, about 202 μg, about 203 μg, about 204 μg, about 205 μg, about 206 μg, about 207 μg, about 208 μg, about 209 μg, about 210 μg, about 211 μg, about 212 μg, about 213 μg, about 214 μg, about 215 μg, about 216 μg, about 217 μg, about 218 μg, about 219 μg, about 220 μg, about 221 μg, about 222 μg, about 223 μg, about 224 μg, about 225 μg, about 226 μg, about 227 μg, about 228 μg, about 229 μg, about 230 μg, about 231 μg, about 232 μg, about 233 μg, about 234 μg, about 235 μg, about 236 μg, about 237 μg, about 238 μg, about 239 μg, about 240 μg, about 241 μg, about 242 μg, about 243 μg, about 244 μg, about 245 μg, about 246 μg, about 247 μg, about 248 μg, about 249 μg, about 250 μg, about 251 μg, about 252 μg, about 253 μg, about 254 μg, about 255 μg, about 256 μg, about 257 μg, about 258 μg, about 259 μg, about 260 μg, about 261 μg, about 262 μg, about 263 μg, about 264 μg, about 265 μg, about 266 μg, about 267 μg, about 268 μg, about 269 μg, about 270 μg, about 271 μg, about 272 μg, about 273 μg, about 274 μg, about 275 μg, about 276 μg, about 277 μg, about 278 μg, about 279 μg, about 280 μg, about 281 μg, about 282 μg, about 283 μg, about 284 μg, about 285 μg, about 286 μg, about 287 μg, about 288 μg, about 289 μg, about 290 μg, about 291 μg, about 292 μg, about 293 μg, about 294 μg, about 295 μg, about 296 μg, about 297 μg, about 298 μg, about 299 μg, or about 300 μg of each RSV F glycoprotein, including all values and ranges therebetween. In embodiments, the immunogenic compositions described herein comprise about 60 μg of each RSV F glycoprotein. In embodiments, the immunogenic compositions described herein comprise about 240 μg of each RSV F glycoprotein.

[0256] In embodiments, the immunogenic compositions described herein comprise from about 1 μg to about 1000 μg of total RSV F glycoproteins. In embodiments, the immunogenic compositions comprise about 1 μg, about 2 μg, about 3 μg, about 4 μg, about 5 μg, about 6 μg, about 7 μg, about 8 μg, about 9 μg, about 10 μg, about 11 μg, about 12 μg, about 13 μg, about 14 μg, about 15 μg, about 16 μg, about 17 μg, about 18 μg, about 19 μg, about 20 μg, about 21 μg, about 22 μg, about 23 μg, about 24 μg, about 25 μg, about 26 μg, about 27 μg, about 28 μg, about 29 μg, about 30 μg, about 31 μg, about 32 μg, about 33 μg, about 34 μg, about 35 μg, about 36 μg, about 37 μg, about 38 μg, about 39 μg, about 40 μg, about 41 μg, about 42 μg, about 43 μg, about 44 μg, about 45 μg, about 46 μg, about 47 μg, about 48 μg, about 49 μg, about 50 μg, about 51 μg, about 52 μg, about 53 μg, about 54 μg, about 55 μg, about 56 μg, about 57 μg, about 58 μg, about 59 μg, about 60 μg, about 61 μg, about 62 μg, about 63 μg, about 64 μg, about 65 μg, about 66 μg, about 67 μg, about 68 μg, about 69 μg, about 70 μg, about 71 μg, about 72 μg, about 73 μg, about 74 μg, about 75 μg, about 76 μg, about 77 μg, about 78 μg, about 79 μg, about 80 μg, about 81 μg, about 82 μg, about 83 μg, about 84 μg, about 85 μg, about 86 μg, about 87 μg, about 88 μg, about 89 μg, about 90 μg, about 91 μg, about 92 μg, about 93 μg, about 94 μg, about 95 μg, about 96 μg, about 97 μg, about 98 μg, about 99 μg, about 100 μg, about 101 μg, about 102 μg, about 103 μg, about 104 μg, about 105 μg, about 106 μg, about 107 μg, about 108 μg, about 109 μg, about 110 μg, about 111 μg, about 112 μg, about 113 μg, about 114 μg, about 115 μg, about 116 μg, about 117 μg, about 118 μg, about 119 μg, about 120 μg, about 121 μg, about 122 μg, about 123 μg, about 124 μg, about 125 μg, about 126 μg, about 127 μg, about 128 μg, about 129 μg, about 130 μg, about 131 μg, about 132 μg, about 133 μg, about 134 μg, about 135 μg, about 136 μg, about 137 μg, about 138 μg, about 139 μg, about 140 μg, about 141 μg, about 142 μg, about 143 μg, about 144 μg, about 145 μg, about 146 μg, about 147 μg, about 148 μg, about 149 μg, about 150 μg, about 151 μg, about 152 μg, about 153 μg, about 154 μg, about 155 μg, about 156 μg, about 157 μg, about 158 μg, about 159 μg, about 160 μg, about 161 μg, about 162 μg, about 163 μg, about 164 μg, about 165 μg, about 166 μg, about 167 μg, about 168 μg, about 169 μg, about 170 μg, about 171 μg, about 172 μg, about 173 μg, about 174 μg, about 175 μg, about 176 μg, about 177 μg, about 178 μg, about 179 μg, about 180 μg, about 181 μg, about 182 μg, about 183 μg, about 184 μg, about 185 μg, about 186 μg, about 187 μg, about 188 μg, about 189 μg, about 190 μg, about 191 μg, about 192 μg, about 193 μg, about 194 μg, about 195 μg, about 196 μg, about 197 μg, about 198 μg, about 199 μg, about 200 μg, about 201 μg, about 202 μg, about 203 μg, about 204 μg, about 205 μg, about 206 μg, about 207 μg, about 208 μg, about 209 μg, about 210 μg, about 211 μg, about 212 μg, about 213 μg, about 214 μg, about 215 μg, about 216 μg, about 217 μg, about 218 μg, about 219 μg, about 220 μg, about 221 μg, about 222 μg, about 223 μg, about 224 μg, about 225 μg, about 226 μg, about 227 μg, about 228 μg, about 229 μg, about 230 μg, about 231 μg, about 232 μg, about 233 μg, about 234 μg, about 235 μg, about 236 μg, about 237 μg, about 238 μg, about 239 μg, about 240 μg, about 241 μg, about 242 μg, about 243 μg, about 244 μg, about 245 μg, about 246 μg, about 247 μg, about 248 μg, about 249 μg, about 250 μg, about 251 μg, about 252 μg, about 253 μg, about 254 μg, about 255 μg, about 256 μg, about 257 μg, about 258 μg, about 259 μg, about 260 μg, about 261 μg, about 262 μg, about 263 μg, about 264 μg, about 265 μg, about 266 μg, about 267 μg, about 268 μg, about 269 μg, about 270 μg, about 271 μg, about 272 μg, about 273 μg, about 274 μg, about 275 μg, about 276 μg, about 277 μg, about 278 μg, about 279 μg, about 280 μg, about 281 μg, about 282 μg, about 283 μg, about 284 μg, about 285 μg, about 286 μg, about 287 μg, about 288 μg, about 289 μg, about 290 μg, about 291 μg, about 292 μg, about 293 μg, about 294 μg, about 295 μg, about 296 μg, about 297 μg, about 298 μg, about 299 μg, about 300 μg, about 301 μg, about 302 μg, about 303 μg, about 304 μg, about 305 μg, about 306 μg, about 307 μg, about 308 μg, about 309 μg, about 310 μg, about 311 μg, about 312 μg, about 313 μg, about 314 μg, about 315 μg, about 316 μg, about 317 μg, about 318 μg, about 319 μg, about 320 μg, about 321 μg, about 322 μg, about 323 μg, about 324 μg, about 325 μg, about 326 μg, about 327 μg, about 328 μg, about 329 μg, about 330 μg, about 331 μg, about 332 μg, about 333 μg, about 334 μg, about 335 μg, about 336 μg, about 337 μg, about 338 μg, about 339 μg, about 340 μg, about 341 μg, about 342 μg, about 343 μg, about 344 μg, about 345 μg, about 346 μg, about 347 μg, about 348 μg, about 349 μg, about 350 μg, about 351 μg, about 352 μg, about 353 μg, about 354 μg, about 355 μg, about 356 μg, about 357 μg, about 358 μg, about 359 μg, about 360 μg, about 361 μg, about 362 μg, about 363 μg, about 364 μg, about 365 μg, about 366 μg, about 367 μg, about 368 μg, about 369 μg, about 370 μg, about 371 μg, about 372 μg, about 373 μg, about 374 μg, about 375 μg, about 376 μg, about 377 μg, about 378 μg, about 379 μg, about 380 μg, about 381 μg, about 382 μg, about 383 μg, about 384 μg, about 385 μg, about 386 μg, about 387 μg, about 388 μg, about 389 μg, about 390 μg, about 391 μg, about 392 μg, about 393 μg, about 394 μg, about 395 μg, about 396 μg, about 397 μg, about 398 μg, about 399 μg, about 400 μg, about 401 μg, about 402 μg, about 403 μg, about 404 μg, about 405 μg, about 406 μg, about 407 μg, about 408 μg, about 409 μg, about 410 μg, about 411 μg, about 412 μg, about 413 μg, about 414 μg, about 415 μg, about 416 μg, about 417 μg, about 418 μg, about 419 μg, about 420 μg, about 421 μg, about 422 μg, about 423 μg, about 424 μg, about 425 μg, about 426 μg, about 427 μg, about 428 μg, about 429 μg, about 430 μg, about 431 μg, about 432 μg, about 433 μg, about 434 μg, about 435 μg, about 436 μg, about 437 μg, about 438 μg, about 439 μg, about 440 μg, about 441 μg, about 442 μg, about 443 μg, about 444 μg, about 445 μg, about 446 μg, about 447 μg, about 448 μg, about 449 μg, about 450 μg, about 451 μg, about 452 μg, about 453 μg, about 454 μg, about 455 μg, about 456 μg, about 457 μg, about 458 μg, about 459 μg, about 460 μg, about 461 μg, about 462 μg, about 463 μg, about 464 μg, about 465 μg, about 466 μg, about 467 μg, about 468 μg, about 469 μg, about 470 μg, about 471 μg, about 472 μg, about 473 μg, about 474 μg, about 475 μg, about 476 μg, about 477 μg, about 478 μg, about 479 μg, about 480 μg, about 481 μg, about 482 μg, about 483 μg, about 484 μg, about 485 μg, about 486 μg, about 487 μg, about 488 μg, about 489 μg, about 490 μg, about 491 μg, about 492 μg, about 493 μg, about 494 μg, about 495 μg, about 496 μg, about 497 μg, about 498 μg, about 499 μg, about 500 μg, about 501 μg, about 502 μg, about 503 μg, about 504 μg, about 505 μg, about 506 μg, about 507 μg, about 508 μg, about 509 μg, about 510 μg, about 511 μg, about 512 μg, about 513 μg, about 514 μg, about 515 μg, about 516 μg, about 517 μg, about 518 μg, about 519 μg, about 520 μg, about 521 μg, about 522 μg, about 523 μg, about 524 μg, about 525 μg, about 526 μg, about 527 μg, about 528 μg, about 529 μg, about 530 μg, about 531 μg, about 532 μg, about 533 μg, about 534 μg, about 535 μg, about 536 μg, about 537 μg, about 538 μg, about 539 μg, about 540 μg, about 541 μg, about 542 μg, about 543 μg, about 544 μg, about 545 μg, about 546 μg, about 547 μg, about 548 μg, about 549 μg, about 550 μg, about 551 μg, about 552 μg, about 553 μg, about 554 μg, about 555 μg, about 556 μg, about 557 μg, about 558 μg, about 559 μg, about 560 μg, about 561 μg, about 562 μg, about 563 μg, about 564 μg, about 565 μg, about 566 μg, about 567 μg, about 568 μg, about 569 μg, about 570 μg, about 571 μg, about 572 μg, about 573 μg, about 574 μg, about 575 μg, about 576 μg, about 577 μg, about 578 μg, about 579 μg, about 580 μg, about 581 μg, about 582 μg, about 583 μg, about 584 μg, about 585 μg, about 586 μg, about 587 μg, about 588 μg, about 589 μg, about 590 μg, about 591 μg, about 592 μg, about 593 μg, about 594 μg, about 595 μg, about 596 μg, about 597 μg, about 598 μg, about 599 μg, about 600 μg, about 601 μg, about 602 μg, about 603 μg, about 604 μg, about 605 μg, about 606 μg, about 607 μg, about 608 μg, about 609 μg, about 610 μg, about 611 μg, about 612 μg, about 613 μg, about 614 μg, about 615 μg, about 616 μg, about 617 μg, about 618 μg, about 619 μg, about 620 μg, about 621 μg, about 622 μg, about 623 μg, about 624 μg, about 625 μg, about 626 μg, about 627 μg, about 628 μg, about 629 μg, about 630 μg, about 631 μg, about 632 μg, about 633 μg, about 634 μg, about 635 μg, about 636 μg, about 637 μg, about 638 μg, about 639 μg, about 640 μg, about 641 μg, about 642 μg, about 643 μg, about 644 μg, about 645 μg, about 646 μg, about 647 μg, about 648 μg, about 649 μg, about 650 μg, about 651 μg, about 652 μg, about 653 μg, about 654 μg, about 655 μg, about 656 μg, about 657 μg, about 658 μg, about 659 μg, about 660 μg, about 661 μg, about 662 μg, about 663 μg, about 664 μg, about 665 μg, about 666 μg, about 667 μg, about 668 μg, about 669 μg, about 670 μg, about 671 μg, about 672 μg, about 673 μg, about 674 μg, about 675 μg, about 676 μg, about 677 μg, about 678 μg, about 679 μg, about 680 μg, about 681 μg, about 682 μg, about 683 μg, about 684 μg, about 685 μg, about 686 μg, about 687 μg, about 688 μg, about 689 μg, about 690 μg, about 691 μg, about 692 μg, about 693 μg, about 694 μg, about 695 μg, about 696 μg, about 697 μg, about 698 μg, about 699 μg, about 700 μg, about 701 μg, about 702 μg, about 703 μg, about 704 μg, about 705 μg, about 706 μg, about 707 μg, about 708 μg, about 709 μg, about 710 μg, about 711 μg, about 712 μg, about 713 μg, about 714 μg, about 715 μg, about 716 μg, about 717 μg, about 718 μg, about 719 μg, about 720 μg, about 721 μg, about 722 μg, about 723 μg, about 724 μg, about 725 μg, about 726 μg, about 727 μg, about 728 μg, about 729 μg, about 730 μg, about 731 μg, about 732 μg, about 733 μg, about 734 μg, about 735 μg, about 736 μg, about 737 μg, about 738 μg, about 739 μg, about 740 μg, about 741 μg, about 742 μg, about 743 μg, about 744 μg, about 745 μg, about 746 μg, about 747 μg, about 748 μg, about 749 μg, about 750 μg, about 751 μg, about 752 μg, about 753 μg, about 754 μg, about 755 μg, about 756 μg, about 757 μg, about 758 μg, about 759 μg, about 760 μg, about 761 μg, about 762 μg, about 763 μg, about 764 μg, about 765 μg, about 766 μg, about 767 μg, about 768 μg, about 769 μg, about 770 μg, about 771 μg, about 772 μg, about 773 μg, about 774 μg, about 775 μg, about 776 μg, about 777 μg, about 778 μg, about 779 μg, about 780 μg, about 781 μg, about 782 μg, about 783 μg, about 784 μg, about 785 μg, about 786 μg, about 787 μg, about 788 μg, about 789 μg, about 790 μg, about 791 μg, about 792 μg, about 793 μg, about 794 μg, about 795 μg, about 796 μg, about 797 μg, about 798 μg, about 799 μg, about 800 μg, about 801 μg, about 802 μg, about 803 μg, about 804 μg, about 805 μg, about 806 μg, about 807 μg, about 808 μg, about 809 μg, about 810 μg, about 811 μg, about 812 μg, about 813 μg, about 814 μg, about 815 μg, about 816 μg, about 817 μg, about 818 μg, about 819 μg, about 820 μg, about 821 μg, about 822 μg, about 823 μg, about 824 μg, about 825 μg, about 826 μg, about 827 μg, about 828 μg, about 829 μg, about 830 μg, about 831 μg, about 832 μg, about 833 μg, about 834 μg, about 835 μg, about 836 μg, about 837 μg, about 838 μg, about 839 μg, about 840 μg, about 841 μg, about 842 μg, about 843 μg, about 844 μg, about 845 μg, about 846 μg, about 847 μg, about 848 μg, about 849 μg, about 850 μg, about 851 μg, about 852 μg, about 853 μg, about 854 μg, about 855 μg, about 856 μg, about 857 μg, about 858 μg, about 859 μg, about 860 μg, about 861 μg, about 862 μg, about 863 μg, about 864 μg, about 865 μg, about 866 μg, about 867 μg, about 868 μg, about 869 μg, about 870 μg, about 871 μg, about 872 μg, about 873 μg, about 874 μg, about 875 μg, about 876 μg, about 877 μg, about 878 μg, about 879 μg, about 880 μg, about 881 μg, about 882 μg, about 883 μg, about 884 μg, about 885 μg, about 886 μg, about 887 μg, about 888 μg, about 889 μg, about 890 μg, about 891 μg, about 892 μg, about 893 μg, about 894 μg, about 895 μg, about 896 μg, about 897 μg, about 898 μg, about 899 μg, about 900 μg, about 901 μg, about 902 μg, about 903 μg, about 904 μg, about 905 μg, about 906 μg, about 907 μg, about 908 μg, about 909 μg, about 910 μg, about 911 μg, about 912 μg, about 913 μg, about 914 μg, about 915 μg, about 916 μg, about 917 μg, about 918 μg, about 919 μg, about 920 μg, about 921 μg, about 922 μg, about 923 μg, about 924 μg, about 925 μg, about 926 μg, about 927 μg, about 928 μg, about 929 μg, about 930 μg, about 931 μg, about 932 μg, about 933 μg, about 934 μg, about 935 μg, about 936 μg, about 937 μg, about 938 μg, about 939 μg, about 940 μg, about 941 μg, about 942 μg, about 943 μg, about 944 μg, about 945 μg, about 946 μg, about 947 μg, about 948 μg, about 949 μg, about 950 μg, about 951 μg, about 952 μg, about 953 μg, about 954 μg, about 955 μg, about 956 μg, about 957 μg, about 958 μg, about 959 μg, about 960 μg, about 961 μg, about 962 μg, about 963 μg, about 964 μg, about 965 μg, about 966 μg, about 967 μg, about 968 μg, about 969 μg, about 970 μg, about 971 μg, about 972 μg, about 973 μg, about 974 μg, about 975 μg, about 976 μg, about 977 μg, about 978 μg, about 979 μg, about 980 μg, about 981 μg, about 982 μg, about 983 μg, about 984 μg, about 985 μg, about 986 μg, about 987 μg, about 988 μg, about 989 μg, about 990 μg, about 991 μg, about 992 μg, about 993 μg, about 994 μg, about 995 μg, about 996 μg, about 997 μg, about 998 μg, about 999 μg, about 1000 μg, of total RSV F glycoproteins, including all values and ranges therebetween.

[0257] In embodiments, the immunogenic compositions described herein comprise from about 1 μg to about 400 μg, from 1 μg to about 350 μg, from 1 μg to about 300 μg, from 1 μg to about 250 μg, from 1 μg to about 200 μg, from 1 μg to about 150 μg, from 1 μg to about 100 μg, from 1 μg to about 50 μg, or from 1 μg to about 25 μg of adjuvant. In embodiments, the immunogenic compositions comprise about 1 μg, about 2 μg, about 3 μg, about 4 μg, about 5 μg, about 6 μg, about 7 μg, about 8 μg, about 9 μg, about 10 μg, about 11 μg, about 12 μg, about 13 μg, about 14 μg, about 15 μg, about 16 μg, about 17 μg, about 18 μg, about 19 μg, about 20 μg, about 21 μg, about 22 μg, about 23 μg, about 24 μg, about 25 μg, about 26 μg, about 27 μg, about 28 μg, about 29 μg, about 30 μg, about 31 μg, about 32 μg, about 33 μg, about 34 μg, about 35 μg, about 36 μg, about 37 μg, about 38 μg, about 39 μg, about 40 μg, about 41 μg, about 42 μg, about 43 μg, about 44 μg, about 45 μg, about 46 μg, about 47 μg, about 48 μg, about 49 μg, about 50 μg, about 51 μg, about 52 μg, about 53 μg, about 54 μg, about 55 μg, about 56 μg, about 57 μg, about 58 μg, about 59 μg, about 60 μg, about 61 μg, about 62 μg, about 63 μg, about 64 μg, about 65 μg, about 66 μg, about 67 μg, about 68 μg, about 69 μg, about 70 μg, about 71 μg, about 72 μg, about 73 μg, about 74 μg, about 75 μg, about 76 μg, about 77 μg, about 78 μg, about 79 μg, about 80 μg, about 81 μg, about 82 μg, about 83 μg, about 84 μg, about 85 μg, about 86 μg, about 87 μg, about 88 μg, about 89 μg, about 90 μg, about 91 μg, about 92 μg, about 93 μg, about 94 μg, about 95 μg, about 96 μg, about 97 μg, about 98 μg, about 99 μg, about 100 μg, about 101 μg, about 102 μg, about 103 μg, about 104 μg, about 105 μg, about 106 μg, about 107 μg, about 108 μg, about 109 μg, about 110 μg, about 111 μg, about 112 μg, about 113 μg, about 114 μg, about 115 μg, about 116 μg, about 117 μg, about 118 μg, about 119 μg, about 120 μg, about 121 μg, about 122 μg, about 123 μg, about 124 μg, about 125 μg, about 126 μg, about 127 μg, about 128 μg, about 129 μg, about 130 μg, about 131 μg, about 132 μg, about 133 μg, about 134 μg, about 135 μg, about 136 μg, about 137 μg, about 138 μg, about 139 μg, about 140 μg, about 141 μg, about 142 μg, about 143 μg, about 144 μg, about 145 μg, about 146 μg, about 147 μg, about 148 μg, about 149 μg, about 150 μg, about 151 μg, about 152 μg, about 153 μg, about 154 μg, about 155 μg, about 156 μg, about 157 μg, about 158 μg, about 159 μg, about 160 μg, about 161 μg, about 162 μg, about 163 μg, about 164 μg, about 165 μg, about 166 μg, about 167 μg, about 168 μg, about 169 μg, about 170 μg, about 171 μg, about 172 μg, about 173 μg, about 174 μg, about 175 μg, about 176 μg, about 177 μg, about 178 μg, about 179 μg, about 180 μg, about 181 μg, about 182 μg, about 183 μg, about 184 μg, about 185 μg, about 186 μg, about 187 μg, about 188 μg, about 189 μg, about 190 μg, about 191 μg, about 192 μg, about 193 μg, about 194 μg, about 195 μg, about 196 μg, about 197 μg, about 198 μg, about 199 μg, about 200 μg, about 201 μg, about 202 μg, about 203 μg, about 204 μg, about 205 μg, about 206 μg, about 207 μg, about 208 μg, about 209 μg, about 210 μg, about 211 μg, about 212 μg, about 213 μg, about 214 μg, about 215 μg, about 216 μg, about 217 μg, about 218 μg, about 219 μg, about 220 μg, about 221 μg, about 222 μg, about 223 μg, about 224 μg, about 225 μg, about 226 μg, about 227 μg, about 228 μg, about 229 μg, about 230 μg, about 231 μg, about 232 μg, about 233 μg, about 234 μg, about 235 μg, about 236 μg, about 237 μg, about 238 μg, about 239 μg, about 240 μg, about 241 μg, about 242 μg, about 243 μg, about 244 μg, about 245 μg, about 246 μg, about 247 μg, about 248 μg, about 249 μg, about 250 μg, about 251 μg, about 252 μg, about 253 μg, about 254 μg, about 255 μg, about 256 μg, about 257 μg, about 258 μg, about 259 μg, about 260 μg, about 261 μg, about 262 μg, about 263 μg, about 264 μg, about 265 μg, about 266 μg, about 267 μg, about 268 μg, about 269 μg, about 270 μg, about 271 μg, about 272 μg, about 273 μg, about 274 μg, about 275 μg, about 276 μg, about 277 μg, about 278 μg, about 279 μg, about 280 μg, about 281 μg, about 282 μg, about 283 μg, about 284 μg, about 285 μg, about 286 μg, about 287 μg, about 288 μg, about 289 μg, about 290 μg, about 291 μg, about 292 μg, about 293 μg, about 294 μg, about 295 μg, about 296 μg, about 297 μg, about 298 μg, about 299 μg, about 300 μg, about 301 μg, about 302 μg, about 303 μg, about 304 μg, about 305 μg, about 306 μg, about 307 μg, about 308 μg, about 309 μg, about 310 μg, about 311 μg, about 312 μg, about 313 μg, about 314 μg, about 315 μg, about 316 μg, about 317 μg, about 318 μg, about 319 μg, about 320 μg, about 321 μg, about 322 μg, about 323 μg, about 324 μg, about 325 μg, about 326 μg, about 327 μg, about 328 μg, about 329 μg, about 330 μg, about 331 μg, about 332 μg, about 333 μg, about 334 μg, about 335 μg, about 336 μg, about 337 μg, about 338 μg, about 339 μg, about 340 μg, about 341 μg, about 342 μg, about 343 μg, about 344 μg, about 345 μg, about 346 μg, about 347 μg, about 348 μg, about 349 μg, about 350 μg, about 351 μg, about 352 μg, about 353 μg, about 354 μg, about 355 μg, about 356 μg, about 357 μg, about 358 μg, about 359 μg, about 360 μg, about 361 μg, about 362 μg, about 363 μg, about 364 μg, about 365 μg, about 366 μg, about 367 μg, about 368 μg, about 369 μg, about 370 μg, about 371 μg, about 372 μg, about 373 μg, about 374 μg, about 375 μg, about 376 μg, about 377 μg, about 378 μg, about 379 μg, about 380 μg, about 381 μg, about 382 μg, about 383 μg, about 384 μg, about 385 μg, about 386 μg, about 387 μg, about 388 μg, about 389 μg, about 390 μg, about 391 μg, about 392 μg, about 393 μg, about 394 μg, about 395 μg, about 396 μg, about 397 μg, about 398 μg, about 399 μg, or about 400 μg of adjuvant. In embodiments, the immunogenic composition comprises about 50 μg of adjuvant. In embodiments, the immunogenic composition comprises about 75 μg of adjuvant.

[0258] In embodiments, the dose, as measured in μg, may be the total weight of the composition, or the weight of the nanoparticles, or the weight of the glycoprotein.

### C. Properties of Intranasal Immunogenic Compositions

[0259] In embodiments, intranasal immunogenic compositions are formulated as dry powder compositions, gels, creams, ointments, liquid solutions, or aerosolized preparations.

[0260] In embodiments, an intranasal immunogenic composition is a dry powder composition. In embodiments, particles of the dry powder have an average diameter from about 0.1 μm to about 250 μm. In embodiments, particles of the dry powder have an average diameter of about 0.1 μm, about 0.2 μm, about 0.3 μm, about 0.4 μm, about 0.5 μm, about 0.6 μm, about 0.7 μm, about 0.8 μm, about 0.9 μm, about 1 μm, about 2 μm, about 3 μm, about 4 μm, about 5 μm, about 6 μm, about 7 μm, about 8 μm, about 9 μm, about 10 μm, about 11 μm, about 12 μm, about 13 μm, about 14 μm, about 15 μm, about 16 μm, about 17 μm, about 18 μm, about 19 μm, about 20 μm, about 21 μm, about 22 μm, about 23 μm, about 24 μm, about 25 μm, about 26 μm, about 27 μm, about 28 μm, about 29 μm, about 30 μm, about 31 μm, about 32 μm, about 33 μm, about 34 μm, about 35 μm, about 36 μm, about 37 μm, about 38 μm, about 39 μm, about 40 μm, about 41 μm, about 42 μm, about 43 μm, about 44 μm, about 45 μm, about 46 μm, about 47 μm, about 48 μm, about 49 μm, about 50 μm, about 51 μm, about 52 μm, about 53 μm, about 54 μm, about 55 μm, about 56 μm, about 57 μm, about 58 μm, about 59 μm, about 60 μm, about 61 μm, about 62 μm, about 63 μm, about 64 μm, about 65 μm, about 66 μm, about 67 μm, about 68 μm, about 69 μm, about 70 μm, about 71 μm, about 72 μm, about 73 μm, about 74 μm, about 75 μm, about 76 μm, about 77 μm, about 78 μm, about 79 μm, about 80 μm, about 81 μm, about 82 μm, about 83 μm, about 84 μm, about 85 μm, about 86 μm, about 87 μm, about 88 μm, about 89 μm, about 90 μm, about 91 μm, about 92 μm, about 93 μm, about 94 μm, about 95 μm, about 96 μm, about 97 μm, about 98 μm, about 99 μm, about 100 μm, about 101 μm, about 102 μm, about 103 μm, about 104 μm, about 105 μm, about 106 μm, about 107 μm, about 108 μm, about 109 μm, about 110 μm, about 111 μm, about 112 μm, about 113 μm, about 114 μm, about 115 μm, about 116 μm, about 117 μm, about 118 μm, about 119 μm, about 120 μm, about 121 μm, about 122 μm, about 123 μm, about 124 μm, about 125 μm, about 126 μm, about 127 μm, about 128 μm, about 129 μm, about 130 μm, about 131 μm, about 132 μm, about 133 μm, about 134 μm, about 135 μm, about 136 μm, about 137 μm, about 138 μm, about 139 μm, about 140 μm, about 141 μm, about 142 μm, about 143 μm, about 144 μm, about 145 μm, about 146 μm, about 147 μm, about 148 μm, about 149 μm, about 150 μm, about 151 μm, about 152 μm, about 153 μm, about 154 μm, about 155 μm, about 156 μm, about 157 μm, about 158 μm, about 159 μm, about 160 μm, about 161 μm, about 162 μm, about 163 μm, about 164 μm, about 165 μm, about 166 μm, about 167 μm, about 168 μm, about 169 μm, about 170 μm, about 171 μm, about 172 μm, about 173 μm, about 174 μm, about 175 μm, about 176 μm, about 177 μm, about 178 μm, about 179 μm, about 180 μm, about 181 μm, about 182 μm, about 183 μm, about 184 μm, about 185 μm, about 186 μm, about 187 μm, about 188 μm, about 189 μm, about 190 μm, about 191 μm, about 192 μm, about 193 μm, about 194 μm, about 195 μm, about 196 μm, about 197 μm, about 198 μm, about 199 μm, about 200 μm, about 201 μm, about 202 μm, about 203 μm, about 204 μm, about 205 μm, about 206 μm, about 207 μm, about 208 μm, about 209 μm, about 210 μm, about 211 μm, about 212 μm, about 213 μm, about 214 μm, about 215 μm, about 216 μm, about 217 μm, about 218 μm, about 219 μm, about 220 μm, about 221 μm, about 222 μm, about 223 μm, about 224 μm, about 225 μm, about 226 μm, about 227 μm, about 228 μm, about 229 μm, about 230 μm, about 231 μm, about 232 μm, about 233 μm, about 234 μm, about 235 μm, about 236 μm, about 237 μm, about 238 μm, about 239 μm, about 240 μm, about 241 μm, about 242 μm, about 243 μm, about 244 μm, about 245 μm, about 246 μm, about 247 μm, about 248 μm, about 249 μm, or about 250 μm, including all values and subranges therebetween.

[0261] In embodiments, dry powder compositions comprise a dispersant.

[0262] In embodiments, the intranasal immunogenic compositions are formulated as liquids. In embodiments, a single dose of intranasal immunogenic composition comprises from about 0.05 mL to about 1 mL. In embodiments, a single dose of the intranasal immunogenic composition comprises about 0.05 mL, about 0.1 mL, about 0.2 mL, about 0.3 mL, about 0.4 mL, about 0.5 mL, about 0.6 mL, about 0.7 mL, about 0.8 mL, about 0.9 mL, or about 1 mL.

[0263] In embodiments, the intranasal immunogenic compositions comprise from about 10 μg/mL to about 4 mg/mL of total viral glycoprotein. In embodiments, the intranasal immunogenic compositions comprise from about 10 μg/mL to about 50 μg/mL of total viral glycoprotein. In embodiments, the intranasal immunogenic compositions comprise from about 120 μg/mL to about 600 μg/mL of total viral glycoprotein. In embodiments, the intranasal immunogenic compositions comprise from about 600 μg/mL to about 3 mg/mL of total viral glycoprotein. In embodiments, the intranasal immunogenic compositions comprise about 10 μg/mL, about 20 μg/mL, about 30 μg/mL, about 40 μg/mL, about 50 μg/mL, about 60 μg/mL, about 70 μg/mL, about 80 μg/mL, about 90 μg/mL, about 100 μg/mL, about 110 μg/mL, about 120 μg/mL, about 130 μg/mL, about 140 μg/mL, about 150 μg/mL, about 160 μg/mL, about 170 μg/mL, about 180 μg/mL, about 190 μg/mL, about 200 μg/mL, about 210 μg/mL, about 220 μg/mL, about 230 μg/mL, about 240 μg/mL, about 250 μg/mL, about 260 μg/mL, about 270 μg/mL, about 280 μg/mL, about 290 μg/mL, about 300 μg/mL, about 310 μg/mL, about 320 μg/mL, about 330 μg/mL, about 340 μg/mL, about 350 μg/mL, about 360 μg/mL, about 370 μg/mL, about 380 μg/mL, about 390 μg/mL, about 400 μg/mL, about 410 μg/mL, about 420 μg/mL, about 430 μg/mL, about 440 μg/mL, about 450 μg/mL, about 460 μg/mL, about 470 μg/mL, about 480 μg/mL, about 490 μg/mL, about 500 μg/mL, about 510 μg/mL, about 520 μg/mL, about 530 μg/mL, about 540 μg/mL, about 550 μg/mL, about 560 μg/mL, about 570 μg/mL, about 580 μg/mL, about 590 μg/mL, about 600 μg/mL, about 610 μg/mL, about 620 μg/mL, about 630 μg/mL, about 640 μg/mL, about 650 μg/mL, about 660 μg/mL, about 670 μg/mL, about 680 μg/mL, about 690 μg/mL, about 700 μg/mL, about 710 μg/mL, about 720 μg/mL, about 730 μg/mL, about 740 μg/mL, about 750 μg/mL, about 760 μg/mL, about 770 μg/mL, about 780 μg/mL, about 790 μg/mL, about 800 μg/mL, about 810 μg/mL, about 820 μg/mL, about 830 μg/mL, about 840 μg/mL, about 850 μg/mL, about 860 μg/mL, about 870 μg/mL, about 880 μg/mL, about 890 μg/mL, about 900 μg/mL, about 910 μg/mL, about 920 μg/mL, about 930 μg/mL, about 940 μg/mL, about 950 μg/mL, about 960 μg/mL, about 970 μg/mL, about 980 μg/mL, about 990 μg/mL, about 1000 μg/mL, about 1100 μg/mL, about 1200 μg/mL, about 1300 μg/mL, about 1400 μg/mL, about 1500 μg/mL, about 1600 μg/mL, about 1700 μg/mL, about 1800 μg/mL, about 1900 μg/mL, about 2000 μg/mL, about 2100 μg/mL, about 2200 μg/mL, about 2300 μg/mL, about 2400 μg/mL, about 2500 μg/mL, about 2600 μg/mL, about 2700 μg/mL, about 2800 μg/mL, about 2900 μg/mL, about 3000 μg/mL, about 3100 μg/mL, about 3200 μg/mL, about 3300 μg/mL, about 3400 μg/mL, about 3500 μg/mL, about 3600 μg/mL, about 3700 μg/mL, about 3800 μg/mL, about 3900 μg/mL, or about 4000 μg/mL of total viral glycoprotein, including all values and ranges therebetween.

[0264] In embodiments, the intranasal immunogenic compositions comprise from about 10 μg/mL to about 4 mg/mL of each viral glycoprotein. In embodiments, the intranasal immunogenic compositions comprise from about 10 μg/mL to about 50 μg/mL of each viral glycoprotein. In embodiments, the intranasal immunogenic compositions comprise from about 120 μg/mL to about 600 μg/mL of each viral glycoprotein. In embodiments, the intranasal immunogenic compositions comprise from about 600 μg/mL to about 3 mg/mL of each viral glycoprotein. In embodiments, the intranasal immunogenic compositions comprise about 10 μg/mL, about 20 μg/mL, about 30 μg/mL, about 40 μg/mL, about 50 μg/mL, about 60 μg/mL, about 70 μg/mL, about 80 μg/mL, about 90 μg/mL, about 100 μg/mL, about 110 μg/mL, about 120 μg/mL, about 130 μg/mL, about 140 μg/mL, about 150 μg/mL, about 160 μg/mL, about 170 μg/mL, about 180 μg/mL, about 190 μg/mL, about 200 μg/mL, about 210 μg/mL, about 220 μg/mL, about 230 μg/mL, about 240 μg/mL, about 250 μg/mL, about 260 μg/mL, about 270 μg/mL, about 280 μg/mL, about 290 μg/mL, about 300 μg/mL, about 310 μg/mL, about 320 μg/mL, about 330 μg/mL, about 340 μg/mL, about 350 μg/mL, about 360 μg/mL, about 370 μg/mL, about 380 μg/mL, about 390 μg/mL, about 400 μg/mL, about 410 μg/mL, about 420 μg/mL, about 430 μg/mL, about 440 μg/mL, about 450 μg/mL, about 460 μg/mL, about 470 μg/mL, about 480 μg/mL, about 490 μg/mL, about 500 μg/mL, about 510 μg/mL, about 520 μg/mL, about 530 μg/mL, about 540 μg/mL, about 550 μg/mL, about 560 μg/mL, about 570 μg/mL, about 580 μg/mL, about 590 μg/mL, about 600 μg/mL, about 610 μg/mL, about 620 μg/mL, about 630 μg/mL, about 640 μg/mL, about 650 μg/mL, about 660 μg/mL, about 670 μg/mL, about 680 μg/mL, about 690 μg/mL, about 700 μg/mL, about 710 μg/mL, about 720 μg/mL, about 730 μg/mL, about 740 μg/mL, about 750 μg/mL, about 760 μg/mL, about 770 μg/mL, about 780 μg/mL, about 790 μg/mL, about 800 μg/mL, about 810 μg/mL, about 820 μg/mL, about 830 μg/mL, about 840 μg/mL, about 850 μg/mL, about 860 μg/mL, about 870 μg/mL, about 880 μg/mL, about 890 μg/mL, about 900 μg/mL, about 910 μg/mL, about 920 μg/mL, about 930 μg/mL, about 940 μg/mL, about 950 μg/mL, about 960 μg/mL, about 970 μg/mL, about 980 μg/mL, about 990 μg/mL, about 1000 μg/mL, about 1100 μg/mL, about 1200 μg/mL, about 1300 μg/mL, about 1400 μg/mL, about 1500 μg/mL, about 1600 μg/mL, about 1700 μg/mL, about 1800 μg/mL, about 1900 μg/mL, about 2000 μg/mL, about 2100 μg/mL, about 2200 μg/mL, about 2300 μg/mL, about 2400 μg/mL, about 2500 μg/mL, about 2600 μg/mL, about 2700 μg/mL, about 2800 μg/mL, about 2900 μg/mL, about 3000 μg/mL, about 3100 μg/mL, about 3200 μg/mL, about 3300 μg/mL, about 3400 μg/mL, about 3500 μg/mL, about 3600 μg/mL, about 3700 μg/mL, about 3800 μg/mL, about 3900 μg/mL, or about 4000 μg/mL of each viral glycoprotein, including all values and ranges therebetween.

[0265] In embodiments, the intranasal immunogenic composition comprises atomized particles. In embodiments, the intranasal immunogenic composition comprises aerosolized particles. U.S. Publication No. 2021/0146068 describes properties of aerosols and atomized particles and is incorporated by reference herein in its entirety for all purposes.

### D. Intranasal Devices

[0266] In embodiments, provided herein are intranasal delivery devices comprising an intranasal immunogenic composition described herein. In embodiments, the delivery device is an intranasal device for the administration of liquids. Non-limiting examples of devices useful for the administration of liquid compositions include vapor devices (e.g., vapor inhalers), drop devices (e.g., catheters, single-dose droppers, multi-dose droppers, and unit-dose pipettes), mechanical spray pump devices (e.g., squeeze bottles, multi-dose metered-dose spray pumps, and single/duo-dose spray pumps), bi-directional spray pumps (e.g., breath-actuated nasal delivery devices), gas-driven spray systems/atomizers (e.g., single- or multi-dose HFA or nitrogen propellant-driven metered-dose inhalers, including traditional and circumferential velocity inhalers), and electrically powered nebulizers/atomizers (e.g., pulsation membrane nebulizers, vibrating mechanical nebulizers, and hand-held mechanical nebulizers). In embodiments, the delivery device is an intranasal device for the administration of powders or gels. Non-limiting examples of devices useful for the administration of powder compositions (e.g., lyophilized or otherwise dried intranasal immunogenic compositions) include mechanical powder sprayers (e.g., hand-actuated capsule-based powder spray devices and hand-actuated powder spray devices, hand actuated gel delivery devices), breath-actuated inhalers (e.g., single- or multi-dose nasal inhalers and capsule-based single- or multi-dose nasal inhalers), and insufflators (e.g., breath-actuated nasal delivery devices). In embodiments, the intranasal delivery device is pressurized. Additional intranasal delivery devices are described in International Publication No. 2012/105236 and U.S. Pat. No. 10,441,436, which are incorporated by reference herein in their entireties for all purposes. In embodiments, the intranasal delivery device is a prefilled syringe comprising the intranasal immunogenic composition.

[0267] In embodiments, the intranasal device is a single-use, disposable device. In another embodiment, the intranasal device is a multi- or repeat-use device. In embodiments, the single-use or multi-use device is pre-metered. In embodiments, the single-use or multi-use device is pre-filled. In certain embodiments, the multi- or repeat-use device is refillable.

[0268] Methods for configuring pressurized delivery devices to achieve a particular delivery profile are known in the field. In embodiments, a pressurized nasal delivery device is configured to produce a stream, spray, puff, etc., have a particular characteristic. For example, in one embodiment, to achieve administration to the upper third of the nasal epithelium, the device is configured to produce a strong, focused stream, spray, puff, etc. In one embodiment, the strong focused spray is created by imparting circumferential and/or axial velocity onto the stream of the therapeutic composition being administered into the nose. In another embodiment, to achieve administration to a greater portion of the nasal epithelium (e.g., the entire or the lower two thirds of the nasal epithelium), the device is configured to produce a diffuse and/or weaker stream, spray, puff, etc. In some embodiments, the tip of the delivery device is configured to physically direct the stream, spray, puff, etc., to the desired intranasal location when inserted into the subject's nose. For example, a kink or bend may be introduced into the tip of the delivery device to “point” the stream, spray, puff, etc., at a targeted epithelium. In some embodiments, the delivery pattern of the device is adjustable, such that the device can be differentially configured to target the intranasal immunogenic composition to a particular epithelium, structure, or location within the nose. In certain embodiments, the pooled human immunoglobulin compositions are administered by a breath-powered technology device. In certain embodiments, the breath-powered technology provides positive pressure during administration. In certain embodiments, the positive pressure expands narrow nasal passages. In some embodiments, exhalation into the device propels the therapeutic into the nose, while at the same time closing the soft-palette, thereby reducing deposition of the therapeutic into the throat and/or lungs. In one embodiment, the breath-powered technology device administers an intranasal immunogenic composition described herein into one nostril. In one embodiment, the breath-powered technology device administers an intranasal immunogenic composition described herein into two nostrils.

[0269] Non-limiting examples of commercial intranasal delivery devices include the EQUADEL® nasal spray pump (Aptar Pharma), the Solovent dry powder device (BD Technologies), the Unidose nasal drug delivery device (Consort Medical PLC), the NasoNeb® Nasal Nebulizer (MedInvent, LLC), the VeriDoser® nasal delivery device (Mystic Pharmaceuticals), the VRx2TM nasal delivery device (Mystic Pharmaceuticals), the DirectHaler™ Nasal device (Direct-Haler A/S), the TriViar™ single-use unit-dose dry powder inhaler (Trimel Pharmaceuticals), the SinuStar™ Aerosol Delivery System (Pari USA), the Aero Pump (Aero Pump GmbH), the Fit-Lizer™ nasal delivery device (Shin Nippon Biomedical Laboratories), the LMA MAD Nasal™ device (LMA North America, Inc.), the Compleo intranasal bioadhesive gel delivery system (Trimel Pharmaceuticals), Impel's Pressurized Olfactory Delivery (POD) device (Impel Neuropharma), the ViaNase™ electronic atomizer (Kurve Technology, Inc.), the OptiNose powder delivery device (OptiNose US Inc.), and the Optinose liquid delivery device (OptiNose US Inc.). In embodiments, the intranasal delivery device is a BD Accuspray™ Nasal Spray System. In embodiments, the intranasal delivery device is an intranasal mucosal atomization device (e.g., a MAD Nasal™ atomization device or the BD Accuspray™ Nasal Spray System). When intranasal immunogenic compositions described herein are administered using an intranasal mucosal atomization device, the composition is delivered to the nasal cavity as an atomized mist.

[0270] In embodiments, the intranasal delivery device delivers the intranasal immunogenic composition to the upper respiratory tract. In embodiments, the intranasal delivery device delivers the intranasal immunogenic composition to the lower respiratory tract. In embodiments, the intranasal delivery device delivers the intranasal immunogenic composition to the lungs.

### E. Methods of Administration of Intranasal Immunogenic Compositions

[0271] In embodiments, the disclosure provides a method for eliciting an immune response against a virus, comprising intranasally administering an immunogenic composition described herein. In embodiments, the virus is SARS-COV-2 or a variant thereof, influenza, RSV, or a combination thereof.

[0272] In embodiments, the immunogenic compositions lack an adjuvant. In embodiments, the immunogenic compositions comprise an adjuvant. Non-limiting examples of adjuvants are described herein.

[0273] In embodiments, the immunogenic compositions described herein have an efficacy against a virus that is between about 50% and about 99%, between about 80% and about 99%, between about 75% and about 99%, between about 80% and about 95%, between about 90% and about 98%, between about 75% and about 95%, at least about 50%, at least about 55%, at least about 60%, at least about 65%, at least about 70%, at least about 75%, at least about 80%, at least about 85%, at least about 90%, at least about 91%, at least about 92%, at least about 93%, at least about 94%, at least about 95%, at least about 96%, at least about 97%, at least about 98%, or at least about 99%.

[0274] Compositions may be administered on a single dose schedule or a multiple dose schedule. Multiple doses may be used in a primary immunization schedule or in a booster immunization schedule. In embodiments, about 1, 2, 3, 4, 5, 6, 7, 8, 9, 10, 11, 12, 13, 14, 15, 16, 17, 18, 19, 20, 21, 22, 23, 24, 25, 26, 27, 28, 29, or 30 doses are administered. In embodiments, doses are administered via the same route. For example, the first dose is intranasal, and the second dose is intranasal. In embodiments, doses are administered via different routes. For example, the first dose and the second dose are administered intramuscularly, and the third dose is administered intranasally.

[0275] In embodiments, the immunogenic compositions described herein are administered about 2 weeks, about 3 weeks, about 4 weeks, about 5 weeks, about 6 weeks, about 7 weeks, about 8 weeks, about 9 weeks, about 10 weeks, about 11 weeks, about 12 weeks, about 13 weeks, about 14 weeks, about 15 weeks, about 16 weeks, about 17 weeks, about 18 weeks, about 19 weeks, about 20 weeks, about 21 weeks, about 22 weeks, about 23 weeks, about 24 weeks, about 25 weeks, about 26 weeks, about 27 weeks, about 28 weeks, about 29 weeks, about 30 weeks, about 31 weeks, about 32 weeks, about 33 weeks, about 34 weeks, about 35 weeks, about 36, weeks, about 37 weeks, about 38 weeks, about 39 weeks, about 40 weeks, about 41 weeks, about 42 weeks, about 43 weeks, about 44 weeks, about 45 weeks, about 46 weeks, about 47 weeks, about 48 weeks, about 49 weeks, about 50 weeks, about 51 weeks, about 52 weeks, about 1 year, about 18 months, about 2 years, about 2.5 years, about 3 years, about 3.5 years, about 4 years, about 4.5 years, about 5 years, about 5.5 years, about 6 years, about 6.5 years, about 7 years, about 7.5 years, about 8 years, about 8.5 years, about 9 years, about 9.5 years, or about 10 years after a first, second, or subsequent dose of an immunogenic composition.

[0276] In embodiments, a boost dose is administered about 2 weeks, about 3 weeks, about 4 weeks, about 5 weeks, about 6 weeks, about 2 months, about 3 months, about 4 months, about 5 months, about 6 months, about 7 months, about 8 months, about 9 months, about 10 months, about 11 months, about 12 months (1 year), about 2 years, about 3 years, about 4 years, about 5 years, about 6 years, about 7 years, about 8 years, about 9 years, or about 10 years after the first dose. In embodiments, a boost dose is administered every year after administration of the initial dose. In embodiments, the follow-on boost dose is administered 3 weeks or 4 weeks after administration of the prior dose. In embodiments, the first dose is administered at day 0, and the boost dose is administered at day 21. In embodiments, the first dose is administered at day 0, and the boost dose is administered at day 28. In embodiments, the first dose is administered at day 0, a boost dose is administered at day 21, and a second boost dose is administered about six months after administration of the first dose or second dose. In embodiments, the first dose is administered at day 0, and the boost dose is administered at day 28, and a second boost dose is administered about six months after administration of the first dose. In embodiments, the first dose is administered at day 0, a boost dose is administered at day 21, and a second boost dose is administered about six months after administration of the second dose. In embodiments, the first dose is administered at day 0, and the boost dose is administered at day 28, and a second boost dose is administered about six months after administration of the second dose.

[0277] In embodiments, the first dose is administered at day 0, a boost dose is administered at day 21, and a second boost dose is administered about 1 year after administration of the first dose or the first boost dose. In embodiments, the first dose is administered at day 0, a first boost dose is administered at day 28, and a second boost dose is administered about 1 year after administration of the first dose. In embodiments, the first dose is administered at day 0, a boost dose is administered at day 21, and a second boost dose is administered about 1 year after administration of the second dose. In embodiments, the first dose is administered at day 0, a first boost dose is administered at day 28, and a second boost dose is administered about 1 year after administration of the second dose. In embodiments, the second boost dose is administered from 6 months to 24 months or from 12 to 24 months after the first boost dose.

[0278] In embodiments, the boost dose comprises the same immunogenic composition as the initial dose. In embodiments, the boost dose comprises a different immunogenic composition than the initial dose. In embodiments, the initial or boost dose comprises an immunogenic composition comprising a SARS-COV-2 Spike glycoprotein, an mRNA encoding a SARS-Cov-2 Spike glycoprotein, a plasmid DNA encoding a SARS-Cov-2 Spike glycoprotein, an viral vector encoding a SARS-Cov-2 Spike glycoprotein, or an inactivated SARS-COV-2 virus. In embodiments, the boost dose comprises the initial immunogenic composition. In embodiments, the initial dose comprises a SARS-COV-2 S glycoprotein (e.g., a SARS COV-2 S glycoprotein having the amino acid sequence of SEQ ID NO: 87), and the boost dose comprises the same SARS-CoV-2 S glycoprotein (e.g., a SARS COV-2 S glycoprotein having the amino acid sequence of SEQ ID NO: 87). In embodiments, the initial dose comprises a SARS-COV-2 S glycoprotein (e.g., a SARS COV-2 S glycoprotein having the amino acid sequence of SEQ ID NO: 87), and the boost dose comprises a different SARS-COV-2 S glycoprotein (e.g., a SARS COV-2 S glycoprotein having the amino acid sequence of SEQ ID NO: 132).

[0279] In embodiments, the initial dose comprises a combination of SARS-COV-2 S glycoproteins (e.g., a SARS COV-2 S glycoprotein having the amino acid sequence of SEQ ID NO: 87 and a SARS COV-2 S glycoprotein having the amino acid sequence of SEQ ID NO: 132). In embodiments, the boost dose comprises a combination of SARS-COV-2 S glycoproteins (e.g., a SARS COV-2 S glycoprotein having the amino acid sequence of SEQ ID NO: 87 and a SARS CoV-2 S glycoprotein having the amino acid sequence of SEQ ID NO: 132). In embodiments, the initial dose comprises a SARS-COV-2 S glycoprotein, a plasmid DNA encoding a SARS-Cov-2 S glycoprotein, an viral vector encoding a SARS-COV-2 Spike glycoprotein, or an inactivated SARS-COV-2 virus. In embodiments, the initial dose comprises a SARS-COV-2 Spike glycoprotein, a plasmid DNA encoding a SARS-COV-2 Spike glycoprotein, an viral vector encoding a SARS-Cov-2 Spike glycoprotein, or an inactivated SARS-COV-2 virus, and the boost dose comprises one or more SARS-COV-2 S glycoproteins.

[0280] In embodiments, intranasal administration of the composition includes administration of a liquid drop of the composition directly onto the nasal epithelium. In embodiments, the methods comprise administering from 1 to 100, from 1 to 90, from 1 to 80, from 1 to 70, from 1 to 60, from 1 to 50, from 1 to 40, from 1 to 30, from 1 to 20, from 1 to 10, or from 1 to 5 drops of the immunogenic composition are intranasally. In embodiments, the liquid drop is delivered by an intranasal delivery device described herein.

[0281] In embodiments, the methods comprise administering an aerosol of an immunogenic composition described herein to the nasal epithelium. In embodiments, the aerosol is a liquid aerosol. In embodiments, the aerosol is a powder aerosol. A powder aerosol comprises a dry powder composition. In embodiments, the methods comprise administering from 1 to 100, from 1 to 90, from 1 to 80, from 1 to 70, from 1 to 60, from 1 to 50, from 1 to 40, from 1 to 30, from 1 to 20, from 1 to 10, or from 1 to 5 sprays of the aerosol intranasally. In embodiments, the aerosol is delivered by an intranasal delivery device described herein.

[0282] In embodiments, the methods comprise administering an intranasal immunogenic composition that is in solution. In embodiments, the methods comprise administering an intranasal immunogenic composition that is in suspension.

[0283] In embodiments, the methods comprise intranasally administering a mist or puff of an intranasal immunogenic composition to a patient's nostril. In embodiments, the methods comprise intranasally administering from 1 to about 100 mists or puffs of an intranasal immunogenic composition to a patient's nostril. In embodiments, the methods comprise intranasally administering about 1, about 2, about 3, about 4, about 5, about 6, about 7, about 8, about 9, about 10, about 11, about 12, about 13, about 14, about 15, about 16, about 17, about 18, about 19, about 20, about 21, about 22, about 23, about 24, about 25, about 26, about 27, about 28, about 29, about 30, about 31, about 32, about 33, about 34, about 35, about 36, about 37, about 38, about 39, about 40, about 41, about 42, about 43, about 44, about 45, about 46, about 47, about 48, about 49, about 50, about 51, about 52, about 53, about 54, about 55, about 56, about 57, about 58, about 59, about 60, about 61, about 62, about 63, about 64, about 65, about 66, about 67, about 68, about 69, about 70, about 71, about 72, about 73, about 74, about 75, about 76, about 77, about 78, about 79, about 80, about 81, about 82, about 83, about 84, about 85, about 86, about 87, about 88, about 89, about 90, about 91, about 92, about 93, about 94, about 95, about 96, about 97, about 98, about 99, or about 100 puffs or mists, including all values and ranges therebetween, of an intranasal immunogenic composition to a patient's nostril. In embodiments, a mist or puff is delivered to each of the patient's nostrils.

[0284] In embodiments, the methods described herein allow the immunogenic composition to reach the lungs of a patient. In embodiments, the methods described herein allow the immunogenic composition to reach the upper respiratory tract of a patient. In embodiments, the methods described herein allow the immunogenic composition to reach the lower respiratory tract of a patient.

[0285] In embodiments, the methods comprise intranasally administering from 0.05 mL to about 1 mL of an intranasal immunogenic composition described herein. In embodiments, the methods comprise intranasally administering from about 0.05 mL, about 0.1 mL, about 0.2 mL, about 0.3 mL, about 0.4 mL, about 0.5 mL, about 0.6 mL, about 0.7 mL, about 0.8 mL, about 0.9 mL, or about 1 mL of an intranasal immunogenic composition described herein, including all values and ranges therebetween. In embodiments the methods comprise intranasally administering 0.2 mL of an intranasal immunogenic composition described herein. In embodiments the methods comprise intranasally administering 0.5 mL of an intranasal immunogenic composition described herein. In embodiments the methods comprise intranasally administering 0.25 mL of an intranasal immunogenic composition described herein to each nostril of a patient.

[0286] In embodiments, provided herein are methods of producing IgA and/or IgG antibodies against SARS-COV-2, influenza, and/or RSV in a subject. In embodiments, the antibodies are neutralizing antibodies. In embodiments, provided herein are methods of inducing mucosal immunity against SARS-COV-2, influenza, RSV, or a combination thereof in a patient comprising intranasally administering the intranasal immunogenic composition described herein. In embodiments, the antibodies are located in the bronchoalveolar lavage of the subject.

[0287] In some embodiments, the disclosure provides co-formulation (i.e., prefilled syringes or pre-mix) strategies for intranasal immunogenic compositions comprising nanoparticles. Typical vaccine administration strategies currently being utilized are bedside mix formulations. That is, vaccine compositions and adjuvants are stored separately and are mixed prior to administration. Pre-mix, co-formulation, or prefilled syringe strategies for vaccine are less common due to the concerns of the stability of the antigens and their subsequent immunogenic capabilities. The present disclosure provides intranasal immunogenic compositions that can be pre-mixed and stored in advance. The disclosed vaccination strategies and formulations may improve the efficiency of vaccination and may reduce the risks of bedside mixing errors, while maintaining the overall safety and immunogenicity.

[0288] A variety of containers may be used to store and transport the pre-mix formulations, including syringes for single administrations and plastic ampules. In some instances, plastic ampules can be manufactured using the blow-fill-seal manufacturing technique or method. In general, the blow-fill-seal (BFS) manufacturing method includes extruding a plastic material (e.g., resin) to form a parison, which is then placed into a mold and cut to size. A filling needle or mandrel is then used to inflate the plastic, which in turn, results in a hollow ampule that substantially conforms to the shape of the mold. Once inflated, a desired volume of liquid can be injected into the ampule, the filling needle or mandrel can be removed, and the ampule can be sealed. Accordingly, BFS can be an automated process that can be performed in a sterile environment without direct human intervention.

[0289] In some instances, the ability to aseptically manufacture sterile ampules containing a desired liquid can make BFS manufactured ampules particularly well suited for the pharmaceutical industry. BFS technology, however, has not been compatible with all pharmaceutical liquids, products, etc. For example, some known BFS manufacturing methods include delivering the liquid or product into the ampule while the plastic is still relatively hot, which can result in adverse effects to temperature sensitive liquids and/or products such as vaccines, biologics, etc. Advances in cool BFS technology, however, have increased the variety of suitable products, liquids, etc. allowing some vaccines, biologics, and/or other temperature sensitive pharmaceuticals to be contained in BFS ampules.

[0290] In some instances, a BFS ampule can have a size, shape, and/or configuration that is at least partially based on a desired use and/or a desired pharmaceutical liquid or dosage that the ampule is configured to contain. For example, some known BFS ampules can include a pierce through top, a twist-off top, a top including a male or female luer, and/or the like. Some known BFS ampules can have a size and/or shape based on volume of the liquid or dosage configured to be disposed therein. In addition, some known BFS ampules can be manufactured in a strip of multiple, temporarily connected ampules, which can increase manufacturing, packaging, and/or storing efficiencies and/or the like.

[0291] In embodiments, the immunogenic compositions described herein are provided in pre-filled syringes. When the immunogenic composition is prepared in a pre-filled syringe, an antigen and adjuvant is combined in advance of administration. In embodiments, the pre-filled syringe contains hemagglutinin, a SARS-COV-2 S glycoprotein, an RSV F glycoprotein, or a combination thereof.

[0292] In embodiments, a subject is administered an intranasal immunogenic composition from a pre-filled syringe.

[0293] In embodiments, the methods comprise administering from about 1 μg to about 400 μg, from 1 μg to about 350 μg, from 1 μg to about 300 μg, from 1 μg to about 250 μg, from 1 μg to about 200 μg, from 1 μg to about 150 μg, from 1 μg to about 100 μg, from 1 μg to about 50 μg, or from 1 μg to about 25 μg of each viral glycoprotein. In embodiments, the methods comprise administering about 1 μg, about 2 μg, about 3 μg, about 4 μg, about 5 μg, about 6 μg, about 7 μg, about 8 μg, about 9 μg, about 10 μg, about 11 μg, about 12 μg, about 13 μg, about 14 μg, about 15 μg, about 16 μg, about 17 μg, about 18 μg, about 19 μg, about 20 μg, about 21 μg, about 22 μg, about 23 μg, about 24 μg, about 25 μg, about 26 μg, about 27 μg, about 28 μg, about 29 μg, about 30 μg, about 31 μg, about 32 μg, about 33 μg, about 34 μg, about 35 μg, about 36 μg, about 37 μg, about 38 μg, about 39 μg, about 40 μg, about 41 μg, about 42 μg, about 43 μg, about 44 μg, about 45 μg, about 46 μg, about 47 μg, about 48 μg, about 49 μg, about 50 μg, about 51 μg, about 52 μg, about 53 μg, about 54 μg, about 55 μg, about 56 μg, about 57 μg, about 58 μg, about 59 μg, about 60 μg, about 61 μg, about 62 μg, about 63 μg, about 64 μg, about 65 μg, about 66 μg, about 67 μg, about 68 μg, about 69 μg, about 70 μg, about 71 μg, about 72 μg, about 73 μg, about 74 μg, about 75 μg, about 76 μg, about 77 μg, about 78 μg, about 79 μg, about 80 μg, about 81 μg, about 82 μg, about 83 μg, about 84 μg, about 85 μg, about 86 μg, about 87 μg, about 88 μg, about 89 μg, about 90 μg, about 91 μg, about 92 μg, about 93 μg, about 94 μg, about 95 μg, about 96 μg, about 97 μg, about 98 μg, about 99 μg, about 100 μg, about 101 μg, about 102 μg, about 103 μg, about 104 μg, about 105 μg, about 106 μg, about 107 μg, about 108 μg, about 109 μg, about 110 μg, about 111 μg, about 112 μg, about 113 μg, about 114 μg, about 115 μg, about 116 μg, about 117 μg, about 118 μg, about 119 μg, about 120 μg, about 121 μg, about 122 μg, about 123 μg, about 124 μg, about 125 μg, about 126 μg, about 127 μg, about 128 μg, about 129 μg, about 130 μg, about 131 μg, about 132 μg, about 133 μg, about 134 μg, about 135 μg, about 136 μg, about 137 μg, about 138 μg, about 139 μg, about 140 μg, about 141 μg, about 142 μg, about 143 μg, about 144 μg, about 145 μg, about 146 μg, about 147 μg, about 148 μg, about 149 μg, about 150 μg, about 151 μg, about 152 μg, about 153 μg, about 154 μg, about 155 μg, about 156 μg, about 157 μg, about 158 μg, about 159 μg, about 160 μg, about 161 μg, about 162 μg, about 163 μg, about 164 μg, about 165 μg, about 166 μg, about 167 μg, about 168 μg, about 169 μg, about 170 μg, about 171 μg, about 172 μg, about 173 μg, about 174 μg, about 175 μg, about 176 μg, about 177 μg, about 178 μg, about 179 μg, about 180 μg, about 181 μg, about 182 μg, about 183 μg, about 184 μg, about 185 μg, about 186 μg, about 187 μg, about 188 μg, about 189 μg, about 190 μg, about 191 μg, about 192 μg, about 193 μg, about 194 μg, about 195 μg, about 196 μg, about 197 μg, about 198 μg, about 199 μg, about 200 μg, about 201 μg, about 202 μg, about 203 μg, about 204 μg, about 205 μg, about 206 μg, about 207 μg, about 208 μg, about 209 μg, about 210 μg, about 211 μg, about 212 μg, about 213 μg, about 214 μg, about 215 μg, about 216 μg, about 217 μg, about 218 μg, about 219 μg, about 220 μg, about 221 μg, about 222 μg, about 223 μg, about 224 μg, about 225 μg, about 226 μg, about 227 μg, about 228 μg, about 229 μg, about 230 μg, about 231 μg, about 232 μg, about 233 μg, about 234 μg, about 235 μg, about 236 μg, about 237 μg, about 238 μg, about 239 μg, about 240 μg, about 241 μg, about 242 μg, about 243 μg, about 244 μg, about 245 μg, about 246 μg, about 247 μg, about 248 μg, about 249 μg, about 250 μg, about 251 μg, about 252 μg, about 253 μg, about 254 μg, about 255 μg, about 256 μg, about 257 μg, about 258 μg, about 259 μg, about 260 μg, about 261 μg, about 262 μg, about 263 μg, about 264 μg, about 265 μg, about 266 μg, about 267 μg, about 268 μg, about 269 μg, about 270 μg, about 271 μg, about 272 μg, about 273 μg, about 274 μg, about 275 μg, about 276 μg, about 277 μg, about 278 μg, about 279 μg, about 280 μg, about 281 μg, about 282 μg, about 283 μg, about 284 μg, about 285 μg, about 286 μg, about 287 μg, about 288 μg, about 289 μg, about 290 μg, about 291 μg, about 292 μg, about 293 μg, about 294 μg, about 295 μg, about 296 μg, about 297 μg, about 298 μg, about 299 μg, about 300 μg, about 301 μg, about 302 μg, about 303 μg, about 304 μg, about 305 μg, about 306 μg, about 307 μg, about 308 μg, about 309 μg, about 310 μg, about 311 μg, about 312 μg, about 313 μg, about 314 μg, about 315 μg, about 316 μg, about 317 μg, about 318 μg, about 319 μg, about 320 μg, about 321 μg, about 322 μg, about 323 μg, about 324 μg, about 325 μg, about 326 μg, about 327 μg, about 328 μg, about 329 μg, about 330 μg, about 331 μg, about 332 μg, about 333 μg, about 334 μg, about 335 μg, about 336 μg, about 337 μg, about 338 μg, about 339 μg, about 340 μg, about 341 μg, about 342 μg, about 343 μg, about 344 μg, about 345 μg, about 346 μg, about 347 μg, about 348 μg, about 349 μg, about 350 μg, about 351 μg, about 352 μg, about 353 μg, about 354 μg, about 355 μg, about 356 μg, about 357 μg, about 358 μg, about 359 μg, about 360 μg, about 361 μg, about 362 μg, about 363 μg, about 364 μg, about 365 μg, about 366 μg, about 367 μg, about 368 μg, about 369 μg, about 370 μg, about 371 μg, about 372 μg, about 373 μg, about 374 μg, about 375 μg, about 376 μg, about 377 μg, about 378 μg, about 379 μg, about 380 μg, about 381 μg, about 382 μg, about 383 μg, about 384 μg, about 385 μg, about 386 μg, about 387 μg, about 388 μg, about 389 μg, about 390 μg, about 391 μg, about 392 μg, about 393 μg, about 394 μg, about 395 μg, about 396 μg, about 397 μg, about 398 μg, about 399 μg, or about 400 μg of each viral glycoprotein.

[0294] In embodiments, the methods comprise administering about 1 μg of each viral glycoprotein. In embodiments, the methods comprise administering about 5 μg of each viral glycoprotein. In embodiments, the methods comprise administering about 25 μg of each viral glycoprotein. In embodiments, the methods comprise administering about 60 μg of each viral glycoprotein. In embodiments, the methods comprise administering about 240 μg of each viral glycoprotein.

[0295] In embodiments, the methods comprise administering from about 1 μg to about 100 μg of each CoV S glycoprotein. In embodiments, the methods comprise administering from about 2.5 μg to about 35 μg of each CoV S glycoprotein. In embodiments, the methods comprise administering from about 5 μg to about 25 μg of each CoV S glycoprotein. In embodiments, the methods comprise administering from about 14 μg to about 15 μg of each CoV S glycoprotein. In embodiments, the methods comprise administering from about 15 μg to about 35 μg of each CoV S glycoprotein. In embodiments, the methods comprise administering from about 1 μg to about 100 μg of total CoV S glycoproteins. In embodiments, the methods comprise administering about 1 μg, about 2 μg, about 3 μg, about 4 μg, about 5 μg, about 6 μg, about 7 μg, about 8 μg, about 9 μg, about 10 μg, about 11 μg, about 12 μg, about 13 μg, about 14 μg, about 15 μg, about 16 μg, about 17 μg, about 18 μg, about 19 μg, about 20 μg, about 21 μg, about 22 μg, about 23 μg, about 24 μg, about 25 μg, about 26 μg, about 27 μg, about 28 μg, about 29 μg, about 30 μg, about 31 μg, about 32 μg, about 33 μg, about 34 μg, about 35 μg, about 36 μg, about 37 μg, about 38 μg, about 39 μg, about 40 μg, about 41 μg, about 42 μg, about 43 μg, about 44 μg, about 45 μg, about 46 μg, about 47 μg, about 48 μg, about 49 μg, about 50 μg, about 51 μg, about 52 μg, about 53 μg, about 54 μg, about 55 μg, about 56 μg, about 57 μg, about 58 μg, about 59 μg, about 60 μg, about 61 μg, about 62 μg, about 63 μg, about 64 μg, about 65 μg, about 66 μg, about 67 μg, about 68 μg, about 69 μg, about 70 μg, about 71 μg, about 72 μg, about 73 μg, about 74 μg, about 75 μg, about 76 μg, about 77 μg, about 78 μg, about 79 μg, about 80 μg, about 81 μg, about 82 μg, about 83 μg, about 84 μg, about 85 μg, about 86 μg, about 87 μg, about 88 μg, about 89 μg, about 90 μg, about 91 μg, about 92 μg, about 93 μg, about 94 μg, about 95 μg, about 96 μg, about 97 μg, about 98 μg, about 99 μg, about 100 μg, including all values and ranges therebetween, of each CoV S glycoprotein. In embodiments, the methods comprise administering about 1 μg, about 2 μg, about 3 μg, about 4 μg, about 5 μg, about 6 μg, about 7 μg, about 8 μg, about 9 μg, about 10 μg, about 11 μg, about 12 μg, about 13 μg, about 14 μg, about 15 μg, about 16 μg, about 17 μg, about 18 μg, about 19 μg, about 20 μg, about 21 μg, about 22 μg, about 23 μg, about 24 μg, about 25 μg, about 26 μg, about 27 μg, about 28 μg, about 29 μg, about 30 μg, about 31 μg, about 32 μg, about 33 μg, about 34 μg, about 35 μg, about 36 μg, about 37 μg, about 38 μg, about 39 μg, about 40 μg, about 41 μg, about 42 μg, about 43 μg, about 44 μg, about 45 μg, about 46 μg, about 47 μg, about 48 μg, about 49 μg, about 50 μg, about 51 μg, about 52 μg, about 53 μg, about 54 μg, about 55 μg, about 56 μg, about 57 μg, about 58 μg, about 59 μg, about 60 μg, about 61 μg, about 62 μg, about 63 μg, about 64 μg, about 65 μg, about 66 μg, about 67 μg, about 68 μg, about 69 μg, about 70 μg, about 71 μg, about 72 μg, about 73 μg, about 74 μg, about 75 μg, about 76 μg, about 77 μg, about 78 μg, about 79 μg, about 80 μg, about 81 μg, about 82 μg, about 83 μg, about 84 μg, about 85 μg, about 86 μg, about 87 μg, about 88 μg, about 89 μg, about 90 μg, about 91 μg, about 92 μg, about 93 μg, about 94 μg, about 95 μg, about 96 μg, about 97 μg, about 98 μg, about 99 μg, about 100 μg of total CoV S glycoproteins, including all values and ranges therebetween. In embodiments, the methods comprise administering about 1 μg of a CoV S glycoprotein. In embodiments, the methods comprise administering about 13 μg of a CoV S glycoprotein. In embodiments, the immunogenic compositions comprise about 5 μg of a CoV S glycoprotein. In embodiments, the methods comprise administering about 25 μg of a CoV S glycoprotein.

[0296] In embodiments, the methods comprise administering from about 1 μg to about 300 μg of each HA glycoprotein. In embodiments, the methods comprise administering from about 5 μg to about 60 μg of each HA glycoprotein. In embodiments, the methods comprise administering from about 24 μg to about 40 μg of each HA glycoprotein. In embodiments, the methods comprise administering from about 30 μg to about 40 μg of each HA glycoprotein. In embodiments, the methods comprise administering from about 30 μg to about 60 μg of each HA glycoprotein. In embodiments, the methods comprise administering from about 33 μg to about 39 μg of each HA glycoprotein. In embodiments, the methods comprise administering from about 20 μg to about 240 μg of each HA glycoprotein. In embodiments, the methods comprise administering from about 30 μg to about 60 μg of each HA glycoprotein. In embodiments, the methods comprise administering from about 24 μg to about 40 μg of each HA glycoprotein. In embodiments, the methods comprise administering about 1 μg, about 2 μg, about 3 μg, about 4 μg, about 5 μg, about 6 μg, about 7 μg, about 8 μg, about 9 μg, about 10 μg, about 11 μg, about 12 μg, about 13 μg, about 14 μg, about 15 μg, about 16 μg, about 17 μg, about 18 μg, about 19 μg, about 20 μg, about 21 μg, about 22 μg, about 23 μg, about 24 μg, about 25 μg, about 26 μg, about 27 μg, about 28 μg, about 29 μg, about 30 μg, about 31 μg, about 32 μg, about 33 μg, about 34 μg, about 35 μg, about 36 μg, about 37 μg, about 38 μg, about 39 μg, about 40 μg, about 41 μg, about 42 μg, about 43 μg, about 44 μg, about 45 μg, about 46 μg, about 47 μg, about 48 μg, about 49 μg, about 50 μg, about 51 μg, about 52 μg, about 53 μg, about 54 μg, about 55 μg, about 56 μg, about 57 μg, about 58 μg, about 59 μg, about 60 μg, about 61 μg, about 62 μg, about 63 μg, about 64 μg, about 65 μg, about 66 μg, about 67 μg, about 68 μg, about 69 μg, about 70 μg, about 71 μg, about 72 μg, about 73 μg, about 74 μg, about 75 μg, about 76 μg, about 77 μg, about 78 μg, about 79 μg, about 80 μg, about 81 μg, about 82 μg, about 83 μg, about 84 μg, about 85 μg, about 86 μg, about 87 μg, about 88 μg, about 89 μg, about 90 μg, about 91 μg, about 92 μg, about 93 μg, about 94 μg, about 95 μg, about 96 μg, about 97 μg, about 98 μg, about 99 μg, about 100 μg, about 101 μg, about 102 μg, about 103 μg, about 104 μg, about 105 μg, about 106 μg, about 107 μg, about 108 μg, about 109 μg, about 110 μg, about 111 μg, about 112 μg, about 113 μg, about 114 μg, about 115 μg, about 116 μg, about 117 μg, about 118 μg, about 119 μg, about 120 μg, about 121 μg, about 122 μg, about 123 μg, about 124 μg, about 125 μg, about 126 μg, about 127 μg, about 128 μg, about 129 μg, about 130 μg, about 131 μg, about 132 μg, about 133 μg, about 134 μg, about 135 μg, about 136 μg, about 137 μg, about 138 μg, about 139 μg, about 140 μg, about 141 μg, about 142 μg, about 143 μg, about 144 μg, about 145 μg, about 146 μg, about 147 μg, about 148 μg, about 149 μg, about 150 μg, about 151 μg, about 152 μg, about 153 μg, about 154 μg, about 155 μg, about 156 μg, about 157 μg, about 158 μg, about 159 μg, about 160 μg, about 161 μg, about 162 μg, about 163 μg, about 164 μg, about 165 μg, about 166 μg, about 167 μg, about 168 μg, about 169 μg, about 170 μg, about 171 μg, about 172 μg, about 173 μg, about 174 μg, about 175 μg, about 176 μg, about 177 μg, about 178 μg, about 179 μg, about 180 μg, about 181 μg, about 182 μg, about 183 μg, about 184 μg, about 185 μg, about 186 μg, about 187 μg, about 188 μg, about 189 μg, about 190 μg, about 191 μg, about 192 μg, about 193 μg, about 194 μg, about 195 μg, about 196 μg, about 197 μg, about 198 μg, about 199 μg, about 200 μg, about 201 μg, about 202 μg, about 203 μg, about 204 μg, about 205 μg, about 206 μg, about 207 μg, about 208 μg, about 209 μg, about 210 μg, about 211 μg, about 212 μg, about 213 μg, about 214 μg, about 215 μg, about 216 μg, about 217 μg, about 218 μg, about 219 μg, about 220 μg, about 221 μg, about 222 μg, about 223 μg, about 224 μg, about 225 μg, about 226 μg, about 227 μg, about 228 μg, about 229 μg, about 230 μg, about 231 μg, about 232 μg, about 233 μg, about 234 μg, about 235 μg, about 236 μg, about 237 μg, about 238 μg, about 239 μg, about 240 μg, about 241 μg, about 242 μg, about 243 μg, about 244 μg, about 245 μg, about 246 μg, about 247 μg, about 248 μg, about 249 μg, about 250 μg, about 251 μg, about 252 μg, about 253 μg, about 254 μg, about 255 μg, about 256 μg, about 257 μg, about 258 μg, about 259 μg, about 260 μg, about 261 μg, about 262 μg, about 263 μg, about 264 μg, about 265 μg, about 266 μg, about 267 μg, about 268 μg, about 269 μg, about 270 μg, about 271 μg, about 272 μg, about 273 μg, about 274 μg, about 275 μg, about 276 μg, about 277 μg, about 278 μg, about 279 μg, about 280 μg, about 281 μg, about 282 μg, about 283 μg, about 284 μg, about 285 μg, about 286 μg, about 287 μg, about 288 μg, about 289 μg, about 290 μg, about 291 μg, about 292 μg, about 293 μg, about 294 μg, about 295 μg, about 296 μg, about 297 μg, about 298 μg, about 299 μg, or about 300 μg of each HA glycoprotein, including all values and ranges therebetween. In embodiments, the methods comprise administering about 30 μg of each HA glycoprotein. In embodiments, the methods comprise administering about 33 μg of each HA glycoprotein. In embodiments, the methods comprise administering about 39 μg of each HA glycoprotein. In embodiments, the methods comprise administering about 54 μg of each HA glycoprotein. In embodiments, the methods comprise administering about 60 μg of each HA glycoprotein. In embodiments, the methods comprise administering about 240 μg of each HA glycoprotein.

[0297] In embodiments, the methods comprise administering from about 1 μg to about 1000 μg of total HA glycoproteins. In embodiments, the methods comprise administering about 1 μg, about 2 μg, about 3 μg, about 4 μg, about 5 μg, about 6 μg, about 7 μg, about 8 μg, about 9 μg, about 10 μg, about 11 μg, about 12 μg, about 13 μg, about 14 μg, about 15 μg, about 16 μg, about 17 μg, about 18 μg, about 19 μg, about 20 μg, about 21 μg, about 22 μg, about 23 μg, about 24 μg, about 25 μg, about 26 μg, about 27 μg, about 28 μg, about 29 μg, about 30 μg, about 31 μg, about 32 μg, about 33 μg, about 34 μg, about 35 μg, about 36 μg, about 37 μg, about 38 μg, about 39 μg, about 40 μg, about 41 μg, about 42 μg, about 43 μg, about 44 μg, about 45 μg, about 46 μg, about 47 μg, about 48 μg, about 49 μg, about 50 μg, about 51 μg, about 52 μg, about 53 μg, about 54 μg, about 55 μg, about 56 μg, about 57 μg, about 58 μg, about 59 μg, about 60 μg, about 61 μg, about 62 μg, about 63 μg, about 64 μg, about 65 μg, about 66 μg, about 67 μg, about 68 μg, about 69 μg, about 70 μg, about 71 μg, about 72 μg, about 73 μg, about 74 μg, about 75 μg, about 76 μg, about 77 μg, about 78 μg, about 79 μg, about 80 μg, about 81 μg, about 82 μg, about 83 μg, about 84 μg, about 85 μg, about 86 μg, about 87 μg, about 88 μg, about 89 μg, about 90 μg, about 91 μg, about 92 μg, about 93 μg, about 94 μg, about 95 μg, about 96 μg, about 97 μg, about 98 μg, about 99 μg, about 100 μg, about 101 μg, about 102 μg, about 103 μg, about 104 μg, about 105 μg, about 106 μg, about 107 μg, about 108 μg, about 109 μg, about 110 μg, about 111 μg, about 112 μg, about 113 μg, about 114 μg, about 115 μg, about 116 μg, about 117 μg, about 118 μg, about 119 μg, about 120 μg, about 121 μg, about 122 μg, about 123 μg, about 124 μg, about 125 μg, about 126 μg, about 127 μg, about 128 μg, about 129 μg, about 130 μg, about 131 μg, about 132 μg, about 133 μg, about 134 μg, about 135 μg, about 136 μg, about 137 μg, about 138 μg, about 139 μg, about 140 μg, about 141 μg, about 142 μg, about 143 μg, about 144 μg, about 145 μg, about 146 μg, about 147 μg, about 148 μg, about 149 μg, about 150 μg, about 151 μg, about 152 μg, about 153 μg, about 154 μg, about 155 μg, about 156 μg, about 157 μg, about 158 μg, about 159 μg, about 160 μg, about 161 μg, about 162 μg, about 163 μg, about 164 μg, about 165 μg, about 166 μg, about 167 μg, about 168 μg, about 169 μg, about 170 μg, about 171 μg, about 172 μg, about 173 μg, about 174 μg, about 175 μg, about 176 μg, about 177 μg, about 178 μg, about 179 μg, about 180 μg, about 181 μg, about 182 μg, about 183 μg, about 184 μg, about 185 μg, about 186 μg, about 187 μg, about 188 μg, about 189 μg, about 190 μg, about 191 μg, about 192 μg, about 193 μg, about 194 μg, about 195 μg, about 196 μg, about 197 μg, about 198 μg, about 199 μg, about 200 μg, about 201 μg, about 202 μg, about 203 μg, about 204 μg, about 205 μg, about 206 μg, about 207 μg, about 208 μg, about 209 μg, about 210 μg, about 211 μg, about 212 μg, about 213 μg, about 214 μg, about 215 μg, about 216 μg, about 217 μg, about 218 μg, about 219 μg, about 220 μg, about 221 μg, about 222 μg, about 223 μg, about 224 μg, about 225 μg, about 226 μg, about 227 μg, about 228 μg, about 229 μg, about 230 μg, about 231 μg, about 232 μg, about 233 μg, about 234 μg, about 235 μg, about 236 μg, about 237 μg, about 238 μg, about 239 μg, about 240 μg, about 241 μg, about 242 μg, about 243 μg, about 244 μg, about 245 μg, about 246 μg, about 247 μg, about 248 μg, about 249 μg, about 250 μg, about 251 μg, about 252 μg, about 253 μg, about 254 μg, about 255 μg, about 256 μg, about 257 μg, about 258 μg, about 259 μg, about 260 μg, about 261 μg, about 262 μg, about 263 μg, about 264 μg, about 265 μg, about 266 μg, about 267 μg, about 268 μg, about 269 μg, about 270 μg, about 271 μg, about 272 μg, about 273 μg, about 274 μg, about 275 μg, about 276 μg, about 277 μg, about 278 μg, about 279 μg, about 280 μg, about 281 μg, about 282 μg, about 283 μg, about 284 μg, about 285 μg, about 286 μg, about 287 μg, about 288 μg, about 289 μg, about 290 μg, about 291 μg, about 292 μg, about 293 μg, about 294 μg, about 295 μg, about 296 μg, about 297 μg, about 298 μg, about 299 μg, about 300 μg, about 301 μg, about 302 μg, about 303 μg, about 304 μg, about 305 μg, about 306 μg, about 307 μg, about 308 μg, about 309 μg, about 310 μg, about 311 μg, about 312 μg, about 313 μg, about 314 μg, about 315 μg, about 316 μg, about 317 μg, about 318 μg, about 319 μg, about 320 μg, about 321 μg, about 322 μg, about 323 μg, about 324 μg, about 325 μg, about 326 μg, about 327 μg, about 328 μg, about 329 μg, about 330 μg, about 331 μg, about 332 μg, about 333 μg, about 334 μg, about 335 μg, about 336 μg, about 337 μg, about 338 μg, about 339 μg, about 340 μg, about 341 μg, about 342 μg, about 343 μg, about 344 μg, about 345 μg, about 346 μg, about 347 μg, about 348 μg, about 349 μg, about 350 μg, about 351 μg, about 352 μg, about 353 μg, about 354 μg, about 355 μg, about 356 μg, about 357 μg, about 358 μg, about 359 μg, about 360 μg, about 361 μg, about 362 μg, about 363 μg, about 364 μg, about 365 μg, about 366 μg, about 367 μg, about 368 μg, about 369 μg, about 370 μg, about 371 μg, about 372 μg, about 373 μg, about 374 μg, about 375 μg, about 376 μg, about 377 μg, about 378 μg, about 379 μg, about 380 μg, about 381 μg, about 382 μg, about 383 μg, about 384 μg, about 385 μg, about 386 μg, about 387 μg, about 388 μg, about 389 μg, about 390 μg, about 391 μg, about 392 μg, about 393 μg, about 394 μg, about 395 μg, about 396 μg, about 397 μg, about 398 μg, about 399 μg, about 400 μg, about 401 μg, about 402 μg, about 403 μg, about 404 μg, about 405 μg, about 406 μg, about 407 μg, about 408 μg, about 409 μg, about 410 μg, about 411 μg, about 412 μg, about 413 μg, about 414 μg, about 415 μg, about 416 μg, about 417 μg, about 418 μg, about 419 μg, about 420 μg, about 421 μg, about 422 μg, about 423 μg, about 424 μg, about 425 μg, about 426 μg, about 427 μg, about 428 μg, about 429 μg, about 430 μg, about 431 μg, about 432 μg, about 433 μg, about 434 μg, about 435 μg, about 436 μg, about 437 μg, about 438 μg, about 439 μg, about 440 μg, about 441 μg, about 442 μg, about 443 μg, about 444 μg, about 445 μg, about 446 μg, about 447 μg, about 448 μg, about 449 μg, about 450 μg, about 451 μg, about 452 μg, about 453 μg, about 454 μg, about 455 μg, about 456 μg, about 457 μg, about 458 μg, about 459 μg, about 460 μg, about 461 μg, about 462 μg, about 463 μg, about 464 μg, about 465 μg, about 466 μg, about 467 μg, about 468 μg, about 469 μg, about 470 μg, about 471 μg, about 472 μg, about 473 μg, about 474 μg, about 475 μg, about 476 μg, about 477 μg, about 478 μg, about 479 μg, about 480 μg, about 481 μg, about 482 μg, about 483 μg, about 484 μg, about 485 μg, about 486 μg, about 487 μg, about 488 μg, about 489 μg, about 490 μg, about 491 μg, about 492 μg, about 493 μg, about 494 μg, about 495 μg, about 496 μg, about 497 μg, about 498 μg, about 499 μg, about 500 μg, about 501 μg, about 502 μg, about 503 μg, about 504 μg, about 505 μg, about 506 μg, about 507 μg, about 508 μg, about 509 μg, about 510 μg, about 511 μg, about 512 μg, about 513 μg, about 514 μg, about 515 μg, about 516 μg, about 517 μg, about 518 μg, about 519 μg, about 520 μg, about 521 μg, about 522 μg, about 523 μg, about 524 μg, about 525 μg, about 526 μg, about 527 μg, about 528 μg, about 529 μg, about 530 μg, about 531 μg, about 532 μg, about 533 μg, about 534 μg, about 535 μg, about 536 μg, about 537 μg, about 538 μg, about 539 μg, about 540 μg, about 541 μg, about 542 μg, about 543 μg, about 544 μg, about 545 μg, about 546 μg, about 547 μg, about 548 μg, about 549 μg, about 550 μg, about 551 μg, about 552 μg, about 553 μg, about 554 μg, about 555 μg, about 556 μg, about 557 μg, about 558 μg, about 559 μg, about 560 μg, about 561 μg, about 562 μg, about 563 μg, about 564 μg, about 565 μg, about 566 μg, about 567 μg, about 568 μg, about 569 μg, about 570 μg, about 571 μg, about 572 μg, about 573 μg, about 574 μg, about 575 μg, about 576 μg, about 577 μg, about 578 μg, about 579 μg, about 580 μg, about 581 μg, about 582 μg, about 583 μg, about 584 μg, about 585 μg, about 586 μg, about 587 μg, about 588 μg, about 589 μg, about 590 μg, about 591 μg, about 592 μg, about 593 μg, about 594 μg, about 595 μg, about 596 μg, about 597 μg, about 598 μg, about 599 μg, about 600 μg, about 601 μg, about 602 μg, about 603 μg, about 604 μg, about 605 μg, about 606 μg, about 607 μg, about 608 μg, about 609 μg, about 610 μg, about 611 μg, about 612 μg, about 613 μg, about 614 μg, about 615 μg, about 616 μg, about 617 μg, about 618 μg, about 619 μg, about 620 μg, about 621 μg, about 622 μg, about 623 μg, about 624 μg, about 625 μg, about 626 μg, about 627 μg, about 628 μg, about 629 μg, about 630 μg, about 631 μg, about 632 μg, about 633 μg, about 634 μg, about 635 μg, about 636 μg, about 637 μg, about 638 μg, about 639 μg, about 640 μg, about 641 μg, about 642 μg, about 643 μg, about 644 μg, about 645 μg, about 646 μg, about 647 μg, about 648 μg, about 649 μg, about 650 μg, about 651 μg, about 652 μg, about 653 μg, about 654 μg, about 655 μg, about 656 μg, about 657 μg, about 658 μg, about 659 μg, about 660 μg, about 661 μg, about 662 μg, about 663 μg, about 664 μg, about 665 μg, about 666 μg, about 667 μg, about 668 μg, about 669 μg, about 670 μg, about 671 μg, about 672 μg, about 673 μg, about 674 μg, about 675 μg, about 676 μg, about 677 μg, about 678 μg, about 679 μg, about 680 μg, about 681 μg, about 682 μg, about 683 μg, about 684 μg, about 685 μg, about 686 μg, about 687 μg, about 688 μg, about 689 μg, about 690 μg, about 691 μg, about 692 μg, about 693 μg, about 694 μg, about 695 μg, about 696 μg, about 697 μg, about 698 μg, about 699 μg, about 700 μg, about 701 μg, about 702 μg, about 703 μg, about 704 μg, about 705 μg, about 706 μg, about 707 μg, about 708 μg, about 709 μg, about 710 μg, about 711 μg, about 712 μg, about 713 μg, about 714 μg, about 715 μg, about 716 μg, about 717 μg, about 718 μg, about 719 μg, about 720 μg, about 721 μg, about 722 μg, about 723 μg, about 724 μg, about 725 μg, about 726 μg, about 727 μg, about 728 μg, about 729 μg, about 730 μg, about 731 μg, about 732 μg, about 733 μg, about 734 μg, about 735 μg, about 736 μg, about 737 μg, about 738 μg, about 739 μg, about 740 μg, about 741 μg, about 742 μg, about 743 μg, about 744 μg, about 745 μg, about 746 μg, about 747 μg, about 748 μg, about 749 μg, about 750 μg, about 751 μg, about 752 μg, about 753 μg, about 754 μg, about 755 μg, about 756 μg, about 757 μg, about 758 μg, about 759 μg, about 760 μg, about 761 μg, about 762 μg, about 763 μg, about 764 μg, about 765 μg, about 766 μg, about 767 μg, about 768 μg, about 769 μg, about 770 μg, about 771 μg, about 772 μg, about 773 μg, about 774 μg, about 775 μg, about 776 μg, about 777 μg, about 778 μg, about 779 μg, about 780 μg, about 781 μg, about 782 μg, about 783 μg, about 784 μg, about 785 μg, about 786 μg, about 787 μg, about 788 μg, about 789 μg, about 790 μg, about 791 μg, about 792 μg, about 793 μg, about 794 μg, about 795 μg, about 796 μg, about 797 μg, about 798 μg, about 799 μg, about 800 μg, about 801 μg, about 802 μg, about 803 μg, about 804 μg, about 805 μg, about 806 μg, about 807 μg, about 808 μg, about 809 μg, about 810 μg, about 811 μg, about 812 μg, about 813 μg, about 814 μg, about 815 μg, about 816 μg, about 817 μg, about 818 μg, about 819 μg, about 820 μg, about 821 μg, about 822 μg, about 823 μg, about 824 μg, about 825 μg, about 826 μg, about 827 μg, about 828 μg, about 829 μg, about 830 μg, about 831 μg, about 832 μg, about 833 μg, about 834 μg, about 835 μg, about 836 μg, about 837 μg, about 838 μg, about 839 μg, about 840 μg, about 841 μg, about 842 μg, about 843 μg, about 844 μg, about 845 μg, about 846 μg, about 847 μg, about 848 μg, about 849 μg, about 850 μg, about 851 μg, about 852 μg, about 853 μg, about 854 μg, about 855 μg, about 856 μg, about 857 μg, about 858 μg, about 859 μg, about 860 μg, about 861 μg, about 862 μg, about 863 μg, about 864 μg, about 865 μg, about 866 μg, about 867 μg, about 868 μg, about 869 μg, about 870 μg, about 871 μg, about 872 μg, about 873 μg, about 874 μg, about 875 μg, about 876 μg, about 877 μg, about 878 μg, about 879 μg, about 880 μg, about 881 μg, about 882 μg, about 883 μg, about 884 μg, about 885 μg, about 886 μg, about 887 μg, about 888 μg, about 889 μg, about 890 μg, about 891 μg, about 892 μg, about 893 μg, about 894 μg, about 895 μg, about 896 μg, about 897 μg, about 898 μg, about 899 μg, about 900 μg, about 901 μg, about 902 μg, about 903 μg, about 904 μg, about 905 μg, about 906 μg, about 907 μg, about 908 μg, about 909 μg, about 910 μg, about 911 μg, about 912 μg, about 913 μg, about 914 μg, about 915 μg, about 916 μg, about 917 μg, about 918 μg, about 919 μg, about 920 μg, about 921 μg, about 922 μg, about 923 μg, about 924 μg, about 925 μg, about 926 μg, about 927 μg, about 928 μg, about 929 μg, about 930 μg, about 931 μg, about 932 μg, about 933 μg, about 934 μg, about 935 μg, about 936 μg, about 937 μg, about 938 μg, about 939 μg, about 940 μg, about 941 μg, about 942 μg, about 943 μg, about 944 μg, about 945 μg, about 946 μg, about 947 μg, about 948 μg, about 949 μg, about 950 μg, about 951 μg, about 952 μg, about 953 μg, about 954 μg, about 955 μg, about 956 μg, about 957 μg, about 958 μg, about 959 μg, about 960 μg, about 961 μg, about 962 μg, about 963 μg, about 964 μg, about 965 μg, about 966 μg, about 967 μg, about 968 μg, about 969 μg, about 970 μg, about 971 μg, about 972 μg, about 973 μg, about 974 μg, about 975 μg, about 976 μg, about 977 μg, about 978 μg, about 979 μg, about 980 μg, about 981 μg, about 982 μg, about 983 μg, about 984 μg, about 985 μg, about 986 μg, about 987 μg, about 988 μg, about 989 μg, about 990 μg, about 991 μg, about 992 μg, about 993 μg, about 994 μg, about 995 μg, about 996 μg, about 997 μg, about 998 μg, about 999 μg, about 1000 μg, of total HA glycoproteins, including all values and ranges therebetween.

[0298] In embodiments, the methods comprise administering from about 1 μg to about 300 μg of each RSV F glycoprotein. In embodiments, the methods comprise administering from about 5 μg to about 60 μg of each RSV F glycoprotein. In embodiments, the methods comprise administering from about 24 μg to about 40 μg of each RSV F glycoprotein. In embodiments, the methods comprise administering from about 30 μg to about 40 μg of each RSV F glycoprotein. In embodiments, the methods comprise administering from about 30 μg to about 60 μg of each RSV F glycoprotein. In embodiments, the methods comprise administering from about 33 μg to about 39 μg of each RSV F glycoprotein. In embodiments, the methods comprise administering from about 20 μg to about 240 μg of each RSV F glycoprotein. In embodiments, the methods comprise administering from about 30 μg to about 60 μg of each RSV F glycoprotein. In embodiments, the methods comprise administering from about 24 μg to about 40 μg of each RSV F glycoprotein. In embodiments, the methods comprise administering about 1 μg, about 2 μg, about 3 μg, about 4 μg, about 5 μg, about 6 μg, about 7 μg, about 8 μg, about 9 μg, about 10 μg, about 11 μg, about 12 μg, about 13 μg, about 14 μg, about 15 μg, about 16 μg, about 17 μg, about 18 μg, about 19 μg, about 20 μg, about 21 μg, about 22 μg, about 23 μg, about 24 μg, about 25 μg, about 26 μg, about 27 μg, about 28 μg, about 29 μg, about 30 μg, about 31 μg, about 32 μg, about 33 μg, about 34 μg, about 35 μg, about 36 μg, about 37 μg, about 38 μg, about 39 μg, about 40 μg, about 41 μg, about 42 μg, about 43 μg, about 44 μg, about 45 μg, about 46 μg, about 47 μg, about 48 μg, about 49 μg, about 50 μg, about 51 μg, about 52 μg, about 53 μg, about 54 μg, about 55 μg, about 56 μg, about 57 μg, about 58 μg, about 59 μg, about 60 μg, about 61 μg, about 62 μg, about 63 μg, about 64 μg, about 65 μg, about 66 μg, about 67 μg, about 68 μg, about 69 μg, about 70 μg, about 71 μg, about 72 μg, about 73 μg, about 74 μg, about 75 μg, about 76 μg, about 77 μg, about 78 μg, about 79 μg, about 80 μg, about 81 μg, about 82 μg, about 83 μg, about 84 μg, about 85 μg, about 86 μg, about 87 μg, about 88 μg, about 89 μg, about 90 μg, about 91 μg, about 92 μg, about 93 μg, about 94 μg, about 95 μg, about 96 μg, about 97 μg, about 98 μg, about 99 μg, about 100 μg, about 101 μg, about 102 μg, about 103 μg, about 104 μg, about 105 μg, about 106 μg, about 107 μg, about 108 μg, about 109 μg, about 110 μg, about 111 μg, about 112 μg, about 113 μg, about 114 μg, about 115 μg, about 116 μg, about 117 μg, about 118 μg, about 119 μg, about 120 μg, about 121 μg, about 122 μg, about 123 μg, about 124 μg, about 125 μg, about 126 μg, about 127 μg, about 128 μg, about 129 μg, about 130 μg, about 131 μg, about 132 μg, about 133 μg, about 134 μg, about 135 μg, about 136 μg, about 137 μg, about 138 μg, about 139 μg, about 140 μg, about 141 μg, about 142 μg, about 143 μg, about 144 μg, about 145 μg, about 146 μg, about 147 μg, about 148 μg, about 149 μg, about 150 μg, about 151 μg, about 152 μg, about 153 μg, about 154 μg, about 155 μg, about 156 μg, about 157 μg, about 158 μg, about 159 μg, about 160 μg, about 161 μg, about 162 μg, about 163 μg, about 164 μg, about 165 μg, about 166 μg, about 167 μg, about 168 μg, about 169 μg, about 170 μg, about 171 μg, about 172 μg, about 173 μg, about 174 μg, about 175 μg, about 176 μg, about 177 μg, about 178 μg, about 179 μg, about 180 μg, about 181 μg, about 182 μg, about 183 μg, about 184 μg, about 185 μg, about 186 μg, about 187 μg, about 188 μg, about 189 μg, about 190 μg, about 191 μg, about 192 μg, about 193 μg, about 194 μg, about 195 μg, about 196 μg, about 197 μg, about 198 μg, about 199 μg, about 200 μg, about 201 μg, about 202 μg, about 203 μg, about 204 μg, about 205 μg, about 206 μg, about 207 μg, about 208 μg, about 209 μg, about 210 μg, about 211 μg, about 212 μg, about 213 μg, about 214 μg, about 215 μg, about 216 μg, about 217 μg, about 218 μg, about 219 μg, about 220 μg, about 221 μg, about 222 μg, about 223 μg, about 224 μg, about 225 μg, about 226 μg, about 227 μg, about 228 μg, about 229 μg, about 230 μg, about 231 μg, about 232 μg, about 233 μg, about 234 μg, about 235 μg, about 236 μg, about 237 μg, about 238 μg, about 239 μg, about 240 μg, about 241 μg, about 242 μg, about 243 μg, about 244 μg, about 245 μg, about 246 μg, about 247 μg, about 248 μg, about 249 μg, about 250 μg, about 251 μg, about 252 μg, about 253 μg, about 254 μg, about 255 μg, about 256 μg, about 257 μg, about 258 μg, about 259 μg, about 260 μg, about 261 μg, about 262 μg, about 263 μg, about 264 μg, about 265 μg, about 266 μg, about 267 μg, about 268 μg, about 269 μg, about 270 μg, about 271 μg, about 272 μg, about 273 μg, about 274 μg, about 275 μg, about 276 μg, about 277 μg, about 278 μg, about 279 μg, about 280 μg, about 281 μg, about 282 μg, about 283 μg, about 284 μg, about 285 μg, about 286 μg, about 287 μg, about 288 μg, about 289 μg, about 290 μg, about 291 μg, about 292 μg, about 293 μg, about 294 μg, about 295 μg, about 296 μg, about 297 μg, about 298 μg, about 299 μg, or about 300 μg of each RSV F glycoprotein, including all values and ranges therebetween. In embodiments, the methods comprise administering about 60 μg of each RSV F glycoprotein. In embodiments, the methods comprise administering about 240 μg of each RSV F glycoprotein.

[0299] In embodiments, the methods comprise administering from about 1 μg to about 1000 μg of total RSV F glycoproteins. In embodiments, the methods comprise administering about 1 μg, about 2 μg, about 3 μg, about 4 μg, about 5 μg, about 6 μg, about 7 μg, about 8 μg, about 9 μg, about 10 μg, about 11 μg, about 12 μg, about 13 μg, about 14 μg, about 15 μg, about 16 μg, about 17 μg, about 18 μg, about 19 μg, about 20 μg, about 21 μg, about 22 μg, about 23 μg, about 24 μg, about 25 μg, about 26 μg, about 27 μg, about 28 μg, about 29 μg, about 30 μg, about 31 μg, about 32 μg, about 33 μg, about 34 μg, about 35 μg, about 36 μg, about 37 μg, about 38 μg, about 39 μg, about 40 μg, about 41 μg, about 42 μg, about 43 μg, about 44 μg, about 45 μg, about 46 μg, about 47 μg, about 48 μg, about 49 μg, about 50 μg, about 51 μg, about 52 μg, about 53 μg, about 54 μg, about 55 μg, about 56 μg, about 57 μg, about 58 μg, about 59 μg, about 60 μg, about 61 μg, about 62 μg, about 63 μg, about 64 μg, about 65 μg, about 66 μg, about 67 μg, about 68 μg, about 69 μg, about 70 μg, about 71 μg, about 72 μg, about 73 μg, about 74 μg, about 75 μg, about 76 μg, about 77 μg, about 78 μg, about 79 μg, about 80 μg, about 81 μg, about 82 μg, about 83 μg, about 84 μg, about 85 μg, about 86 μg, about 87 μg, about 88 μg, about 89 μg, about 90 μg, about 91 μg, about 92 μg, about 93 μg, about 94 μg, about 95 μg, about 96 μg, about 97 μg, about 98 μg, about 99 μg, about 100 μg, about 101 μg, about 102 μg, about 103 μg, about 104 μg, about 105 μg, about 106 μg, about 107 μg, about 108 μg, about 109 μg, about 110 μg, about 111 μg, about 112 μg, about 113 μg, about 114 μg, about 115 μg, about 116 μg, about 117 μg, about 118 μg, about 119 μg, about 120 μg, about 121 μg, about 122 μg, about 123 μg, about 124 μg, about 125 μg, about 126 μg, about 127 μg, about 128 μg, about 129 μg, about 130 μg, about 131 μg, about 132 μg, about 133 μg, about 134 μg, about 135 μg, about 136 μg, about 137 μg, about 138 μg, about 139 μg, about 140 μg, about 141 μg, about 142 μg, about 143 μg, about 144 μg, about 145 μg, about 146 μg, about 147 μg, about 148 μg, about 149 μg, about 150 μg, about 151 μg, about 152 μg, about 153 μg, about 154 μg, about 155 μg, about 156 μg, about 157 μg, about 158 μg, about 159 μg, about 160 μg, about 161 μg, about 162 μg, about 163 μg, about 164 μg, about 165 μg, about 166 μg, about 167 μg, about 168 μg, about 169 μg, about 170 μg, about 171 μg, about 172 μg, about 173 μg, about 174 μg, about 175 μg, about 176 μg, about 177 μg, about 178 μg, about 179 μg, about 180 μg, about 181 μg, about 182 μg, about 183 μg, about 184 μg, about 185 μg, about 186 μg, about 187 μg, about 188 μg, about 189 μg, about 190 μg, about 191 μg, about 192 μg, about 193 μg, about 194 μg, about 195 μg, about 196 μg, about 197 μg, about 198 μg, about 199 μg, about 200 μg, about 201 μg, about 202 μg, about 203 μg, about 204 μg, about 205 μg, about 206 μg, about 207 μg, about 208 μg, about 209 μg, about 210 μg, about 211 μg, about 212 μg, about 213 μg, about 214 μg, about 215 μg, about 216 μg, about 217 μg, about 218 μg, about 219 μg, about 220 μg, about 221 μg, about 222 μg, about 223 μg, about 224 μg, about 225 μg, about 226 μg, about 227 μg, about 228 μg, about 229 μg, about 230 μg, about 231 μg, about 232 μg, about 233 μg, about 234 μg, about 235 μg, about 236 μg, about 237 μg, about 238 μg, about 239 μg, about 240 μg, about 241 μg, about 242 μg, about 243 μg, about 244 μg, about 245 μg, about 246 μg, about 247 μg, about 248 μg, about 249 μg, about 250 μg, about 251 μg, about 252 μg, about 253 μg, about 254 μg, about 255 μg, about 256 μg, about 257 μg, about 258 μg, about 259 μg, about 260 μg, about 261 μg, about 262 μg, about 263 μg, about 264 μg, about 265 μg, about 266 μg, about 267 μg, about 268 μg, about 269 μg, about 270 μg, about 271 μg, about 272 μg, about 273 μg, about 274 μg, about 275 μg, about 276 μg, about 277 μg, about 278 μg, about 279 μg, about 280 μg, about 281 μg, about 282 μg, about 283 μg, about 284 μg, about 285 μg, about 286 μg, about 287 μg, about 288 μg, about 289 μg, about 290 μg, about 291 μg, about 292 μg, about 293 μg, about 294 μg, about 295 μg, about 296 μg, about 297 μg, about 298 μg, about 299 μg, about 300 μg, about 301 μg, about 302 μg, about 303 μg, about 304 μg, about 305 μg, about 306 μg, about 307 μg, about 308 μg, about 309 μg, about 310 μg, about 311 μg, about 312 μg, about 313 μg, about 314 μg, about 315 μg, about 316 μg, about 317 μg, about 318 μg, about 319 μg, about 320 μg, about 321 μg, about 322 μg, about 323 μg, about 324 μg, about 325 μg, about 326 μg, about 327 μg, about 328 μg, about 329 μg, about 330 μg, about 331 μg, about 332 μg, about 333 μg, about 334 μg, about 335 μg, about 336 μg, about 337 μg, about 338 μg, about 339 μg, about 340 μg, about 341 μg, about 342 μg, about 343 μg, about 344 μg, about 345 μg, about 346 μg, about 347 μg, about 348 μg, about 349 μg, about 350 μg, about 351 μg, about 352 μg, about 353 μg, about 354 μg, about 355 μg, about 356 μg, about 357 μg, about 358 μg, about 359 μg, about 360 μg, about 361 μg, about 362 μg, about 363 μg, about 364 μg, about 365 μg, about 366 μg, about 367 μg, about 368 μg, about 369 μg, about 370 μg, about 371 μg, about 372 μg, about 373 μg, about 374 μg, about 375 μg, about 376 μg, about 377 μg, about 378 μg, about 379 μg, about 380 μg, about 381 μg, about 382 μg, about 383 μg, about 384 μg, about 385 μg, about 386 μg, about 387 μg, about 388 μg, about 389 μg, about 390 μg, about 391 μg, about 392 μg, about 393 μg, about 394 μg, about 395 μg, about 396 μg, about 397 μg, about 398 μg, about 399 μg, about 400 μg, about 401 μg, about 402 μg, about 403 μg, about 404 μg, about 405 μg, about 406 μg, about 407 μg, about 408 μg, about 409 μg, about 410 μg, about 411 μg, about 412 μg, about 413 μg, about 414 μg, about 415 μg, about 416 μg, about 417 μg, about 418 μg, about 419 μg, about 420 μg, about 421 μg, about 422 μg, about 423 μg, about 424 μg, about 425 μg, about 426 μg, about 427 μg, about 428 μg, about 429 μg, about 430 μg, about 431 μg, about 432 μg, about 433 μg, about 434 μg, about 435 μg, about 436 μg, about 437 μg, about 438 μg, about 439 μg, about 440 μg, about 441 μg, about 442 μg, about 443 μg, about 444 μg, about 445 μg, about 446 μg, about 447 μg, about 448 μg, about 449 μg, about 450 μg, about 451 μg, about 452 μg, about 453 μg, about 454 μg, about 455 μg, about 456 μg, about 457 μg, about 458 μg, about 459 μg, about 460 μg, about 461 μg, about 462 μg, about 463 μg, about 464 μg, about 465 μg, about 466 μg, about 467 μg, about 468 μg, about 469 μg, about 470 μg, about 471 μg, about 472 μg, about 473 μg, about 474 μg, about 475 μg, about 476 μg, about 477 μg, about 478 μg, about 479 μg, about 480 μg, about 481 μg, about 482 μg, about 483 μg, about 484 μg, about 485 μg, about 486 μg, about 487 μg, about 488 μg, about 489 μg, about 490 μg, about 491 μg, about 492 μg, about 493 μg, about 494 μg, about 495 μg, about 496 μg, about 497 μg, about 498 μg, about 499 μg, about 500 μg, about 501 μg, about 502 μg, about 503 μg, about 504 μg, about 505 μg, about 506 μg, about 507 μg, about 508 μg, about 509 μg, about 510 μg, about 511 μg, about 512 μg, about 513 μg, about 514 μg, about 515 μg, about 516 μg, about 517 μg, about 518 μg, about 519 μg, about 520 μg, about 521 μg, about 522 μg, about 523 μg, about 524 μg, about 525 μg, about 526 μg, about 527 μg, about 528 μg, about 529 μg, about 530 μg, about 531 μg, about 532 μg, about 533 μg, about 534 μg, about 535 μg, about 536 μg, about 537 μg, about 538 μg, about 539 μg, about 540 μg, about 541 μg, about 542 μg, about 543 μg, about 544 μg, about 545 μg, about 546 μg, about 547 μg, about 548 μg, about 549 μg, about 550 μg, about 551 μg, about 552 μg, about 553 μg, about 554 μg, about 555 μg, about 556 μg, about 557 μg, about 558 μg, about 559 μg, about 560 μg, about 561 μg, about 562 μg, about 563 μg, about 564 μg, about 565 μg, about 566 μg, about 567 μg, about 568 μg, about 569 μg, about 570 μg, about 571 μg, about 572 μg, about 573 μg, about 574 μg, about 575 μg, about 576 μg, about 577 μg, about 578 μg, about 579 μg, about 580 μg, about 581 μg, about 582 μg, about 583 μg, about 584 μg, about 585 μg, about 586 μg, about 587 μg, about 588 μg, about 589 μg, about 590 μg, about 591 μg, about 592 μg, about 593 μg, about 594 μg, about 595 μg, about 596 μg, about 597 μg, about 598 μg, about 599 μg, about 600 μg, about 601 μg, about 602 μg, about 603 μg, about 604 μg, about 605 μg, about 606 μg, about 607 μg, about 608 μg, about 609 μg, about 610 μg, about 611 μg, about 612 μg, about 613 μg, about 614 μg, about 615 μg, about 616 μg, about 617 μg, about 618 μg, about 619 μg, about 620 μg, about 621 μg, about 622 μg, about 623 μg, about 624 μg, about 625 μg, about 626 μg, about 627 μg, about 628 μg, about 629 μg, about 630 μg, about 631 μg, about 632 μg, about 633 μg, about 634 μg, about 635 μg, about 636 μg, about 637 μg, about 638 μg, about 639 μg, about 640 μg, about 641 μg, about 642 μg, about 643 μg, about 644 μg, about 645 μg, about 646 μg, about 647 μg, about 648 μg, about 649 μg, about 650 μg, about 651 μg, about 652 μg, about 653 μg, about 654 μg, about 655 μg, about 656 μg, about 657 μg, about 658 μg, about 659 μg, about 660 μg, about 661 μg, about 662 μg, about 663 μg, about 664 μg, about 665 μg, about 666 μg, about 667 μg, about 668 μg, about 669 μg, about 670 μg, about 671 μg, about 672 μg, about 673 μg, about 674 μg, about 675 μg, about 676 μg, about 677 μg, about 678 μg, about 679 μg, about 680 μg, about 681 μg, about 682 μg, about 683 μg, about 684 μg, about 685 μg, about 686 μg, about 687 μg, about 688 μg, about 689 μg, about 690 μg, about 691 μg, about 692 μg, about 693 μg, about 694 μg, about 695 μg, about 696 μg, about 697 μg, about 698 μg, about 699 μg, about 700 μg, about 701 μg, about 702 μg, about 703 μg, about 704 μg, about 705 μg, about 706 μg, about 707 μg, about 708 μg, about 709 μg, about 710 μg, about 711 μg, about 712 μg, about 713 μg, about 714 μg, about 715 μg, about 716 μg, about 717 μg, about 718 μg, about 719 μg, about 720 μg, about 721 μg, about 722 μg, about 723 μg, about 724 μg, about 725 μg, about 726 μg, about 727 μg, about 728 μg, about 729 μg, about 730 μg, about 731 μg, about 732 μg, about 733 μg, about 734 μg, about 735 μg, about 736 μg, about 737 μg, about 738 μg, about 739 μg, about 740 μg, about 741 μg, about 742 μg, about 743 μg, about 744 μg, about 745 μg, about 746 μg, about 747 μg, about 748 μg, about 749 μg, about 750 μg, about 751 μg, about 752 μg, about 753 μg, about 754 μg, about 755 μg, about 756 μg, about 757 μg, about 758 μg, about 759 μg, about 760 μg, about 761 μg, about 762 μg, about 763 μg, about 764 μg, about 765 μg, about 766 μg, about 767 μg, about 768 μg, about 769 μg, about 770 μg, about 771 μg, about 772 μg, about 773 μg, about 774 μg, about 775 μg, about 776 μg, about 777 μg, about 778 μg, about 779 μg, about 780 μg, about 781 μg, about 782 μg, about 783 μg, about 784 μg, about 785 μg, about 786 μg, about 787 μg, about 788 μg, about 789 μg, about 790 μg, about 791 μg, about 792 μg, about 793 μg, about 794 μg, about 795 μg, about 796 μg, about 797 μg, about 798 μg, about 799 μg, about 800 μg, about 801 μg, about 802 μg, about 803 μg, about 804 μg, about 805 μg, about 806 μg, about 807 μg, about 808 μg, about 809 μg, about 810 μg, about 811 μg, about 812 μg, about 813 μg, about 814 μg, about 815 μg, about 816 μg, about 817 μg, about 818 μg, about 819 μg, about 820 μg, about 821 μg, about 822 μg, about 823 μg, about 824 μg, about 825 μg, about 826 μg, about 827 μg, about 828 μg, about 829 μg, about 830 μg, about 831 μg, about 832 μg, about 833 μg, about 834 μg, about 835 μg, about 836 μg, about 837 μg, about 838 μg, about 839 μg, about 840 μg, about 841 μg, about 842 μg, about 843 μg, about 844 μg, about 845 μg, about 846 μg, about 847 μg, about 848 μg, about 849 μg, about 850 μg, about 851 μg, about 852 μg, about 853 μg, about 854 μg, about 855 μg, about 856 μg, about 857 μg, about 858 μg, about 859 μg, about 860 μg, about 861 μg, about 862 μg, about 863 μg, about 864 μg, about 865 μg, about 866 μg, about 867 μg, about 868 μg, about 869 μg, about 870 μg, about 871 μg, about 872 μg, about 873 μg, about 874 μg, about 875 μg, about 876 μg, about 877 μg, about 878 μg, about 879 μg, about 880 μg, about 881 μg, about 882 μg, about 883 μg, about 884 μg, about 885 μg, about 886 μg, about 887 μg, about 888 μg, about 889 μg, about 890 μg, about 891 μg, about 892 μg, about 893 μg, about 894 μg, about 895 μg, about 896 μg, about 897 μg, about 898 μg, about 899 μg, about 900 μg, about 901 μg, about 902 μg, about 903 μg, about 904 μg, about 905 μg, about 906 μg, about 907 μg, about 908 μg, about 909 μg, about 910 μg, about 911 μg, about 912 μg, about 913 μg, about 914 μg, about 915 μg, about 916 μg, about 917 μg, about 918 μg, about 919 μg, about 920 μg, about 921 μg, about 922 μg, about 923 μg, about 924 μg, about 925 μg, about 926 μg, about 927 μg, about 928 μg, about 929 μg, about 930 μg, about 931 μg, about 932 μg, about 933 μg, about 934 μg, about 935 μg, about 936 μg, about 937 μg, about 938 μg, about 939 μg, about 940 μg, about 941 μg, about 942 μg, about 943 μg, about 944 μg, about 945 μg, about 946 μg, about 947 μg, about 948 μg, about 949 μg, about 950 μg, about 951 μg, about 952 μg, about 953 μg, about 954 μg, about 955 μg, about 956 μg, about 957 μg, about 958 μg, about 959 μg, about 960 μg, about 961 μg, about 962 μg, about 963 μg, about 964 μg, about 965 μg, about 966 μg, about 967 μg, about 968 μg, about 969 μg, about 970 μg, about 971 μg, about 972 μg, about 973 μg, about 974 μg, about 975 μg, about 976 μg, about 977 μg, about 978 μg, about 979 μg, about 980 μg, about 981 μg, about 982 μg, about 983 μg, about 984 μg, about 985 μg, about 986 μg, about 987 μg, about 988 μg, about 989 μg, about 990 μg, about 991 μg, about 992 μg, about 993 μg, about 994 μg, about 995 μg, about 996 μg, about 997 μg, about 998 μg, about 999 μg, about 1000 μg, of total RSV F glycoproteins, including all values and ranges therebetween.

[0300] In embodiments, the methods comprise administering from about 1 μg to about 400 μg, from 1 μg to about 350 μg, from 1 μg to about 300 μg, from 1 μg to about 250 μg, from 1 μg to about 200 μg, from 1 μg to about 150 μg, from 1 μg to about 100 μg, from 1 μg to about 50 μg, or from 1 μg to about 25 μg of adjuvant. In embodiments, the immunogenic compositions comprise about 1 μg, about 2 μg, about 3 μg, about 4 μg, about 5 μg, about 6 μg, about 7 μg, about 8 μg, about 9 μg, about 10 μg, about 11 μg, about 12 μg, about 13 μg, about 14 μg, about 15 μg, about 16 μg, about 17 μg, about 18 μg, about 19 μg, about 20 μg, about 21 μg, about 22 μg, about 23 μg, about 24 μg, about 25 μg, about 26 μg, about 27 μg, about 28 μg, about 29 μg, about 30 μg, about 31 μg, about 32 μg, about 33 μg, about 34 μg, about 35 μg, about 36 μg, about 37 μg, about 38 μg, about 39 μg, about 40 μg, about 41 μg, about 42 μg, about 43 μg, about 44 μg, about 45 μg, about 46 μg, about 47 μg, about 48 μg, about 49 μg, about 50 μg, about 51 μg, about 52 μg, about 53 μg, about 54 μg, about 55 μg, about 56 μg, about 57 μg, about 58 μg, about 59 μg, about 60 μg, about 61 μg, about 62 μg, about 63 μg, about 64 μg, about 65 μg, about 66 μg, about 67 μg, about 68 μg, about 69 μg, about 70 μg, about 71 μg, about 72 μg, about 73 μg, about 74 μg, about 75 μg, about 76 μg, about 77 μg, about 78 μg, about 79 μg, about 80 μg, about 81 μg, about 82 μg, about 83 μg, about 84 μg, about 85 μg, about 86 μg, about 87 μg, about 88 μg, about 89 μg, about 90 μg, about 91 μg, about 92 μg, about 93 μg, about 94 μg, about 95 μg, about 96 μg, about 97 μg, about 98 μg, about 99 μg, about 100 μg, about 101 μg, about 102 μg, about 103 μg, about 104 μg, about 105 μg, about 106 μg, about 107 μg, about 108 μg, about 109 μg, about 110 μg, about 111 μg, about 112 μg, about 113 μg, about 114 μg, about 115 μg, about 116 μg, about 117 μg, about 118 μg, about 119 μg, about 120 μg, about 121 μg, about 122 μg, about 123 μg, about 124 μg, about 125 μg, about 126 μg, about 127 μg, about 128 μg, about 129 μg, about 130 μg, about 131 μg, about 132 μg, about 133 μg, about 134 μg, about 135 μg, about 136 μg, about 137 μg, about 138 μg, about 139 μg, about 140 μg, about 141 μg, about 142 μg, about 143 μg, about 144 μg, about 145 μg, about 146 μg, about 147 μg, about 148 μg, about 149 μg, about 150 μg, about 151 μg, about 152 μg, about 153 μg, about 154 μg, about 155 μg, about 156 μg, about 157 μg, about 158 μg, about 159 μg, about 160 μg, about 161 μg, about 162 μg, about 163 μg, about 164 μg, about 165 μg, about 166 μg, about 167 μg, about 168 μg, about 169 μg, about 170 μg, about 171 μg, about 172 μg, about 173 μg, about 174 μg, about 175 μg, about 176 μg, about 177 μg, about 178 μg, about 179 μg, about 180 μg, about 181 μg, about 182 μg, about 183 μg, about 184 μg, about 185 μg, about 186 μg, about 187 μg, about 188 μg, about 189 μg, about 190 μg, about 191 μg, about 192 μg, about 193 μg, about 194 μg, about 195 μg, about 196 μg, about 197 μg, about 198 μg, about 199 μg, about 200 μg, about 201 μg, about 202 μg, about 203 μg, about 204 μg, about 205 μg, about 206 μg, about 207 μg, about 208 μg, about 209 μg, about 210 μg, about 211 μg, about 212 μg, about 213 μg, about 214 μg, about 215 μg, about 216 μg, about 217 μg, about 218 μg, about 219 μg, about 220 μg, about 221 μg, about 222 μg, about 223 μg, about 224 μg, about 225 μg, about 226 μg, about 227 μg, about 228 μg, about 229 μg, about 230 μg, about 231 μg, about 232 μg, about 233 μg, about 234 μg, about 235 μg, about 236 μg, about 237 μg, about 238 μg, about 239 μg, about 240 μg, about 241 μg, about 242 μg, about 243 μg, about 244 μg, about 245 μg, about 246 μg, about 247 μg, about 248 μg, about 249 μg, about 250 μg, about 251 μg, about 252 μg, about 253 μg, about 254 μg, about 255 μg, about 256 μg, about 257 μg, about 258 μg, about 259 μg, about 260 μg, about 261 μg, about 262 μg, about 263 μg, about 264 μg, about 265 μg, about 266 μg, about 267 μg, about 268 μg, about 269 μg, about 270 μg, about 271 μg, about 272 μg, about 273 μg, about 274 μg, about 275 μg, about 276 μg, about 277 μg, about 278 μg, about 279 μg, about 280 μg, about 281 μg, about 282 μg, about 283 μg, about 284 μg, about 285 μg, about 286 μg, about 287 μg, about 288 μg, about 289 μg, about 290 μg, about 291 μg, about 292 μg, about 293 μg, about 294 μg, about 295 μg, about 296 μg, about 297 μg, about 298 μg, about 299 μg, about 300 μg, about 301 μg, about 302 μg, about 303 μg, about 304 μg, about 305 μg, about 306 μg, about 307 μg, about 308 μg, about 309 μg, about 310 μg, about 311 μg, about 312 μg, about 313 μg, about 314 μg, about 315 μg, about 316 μg, about 317 μg, about 318 μg, about 319 μg, about 320 μg, about 321 μg, about 322 μg, about 323 μg, about 324 μg, about 325 μg, about 326 μg, about 327 μg, about 328 μg, about 329 μg, about 330 μg, about 331 μg, about 332 μg, about 333 μg, about 334 μg, about 335 μg, about 336 μg, about 337 μg, about 338 μg, about 339 μg, about 340 μg, about 341 μg, about 342 μg, about 343 μg, about 344 μg, about 345 μg, about 346 μg, about 347 μg, about 348 μg, about 349 μg, about 350 μg, about 351 μg, about 352 μg, about 353 μg, about 354 μg, about 355 μg, about 356 μg, about 357 μg, about 358 μg, about 359 μg, about 360 μg, about 361 μg, about 362 μg, about 363 μg, about 364 μg, about 365 μg, about 366 μg, about 367 μg, about 368 μg, about 369 μg, about 370 μg, about 371 μg, about 372 μg, about 373 μg, about 374 μg, about 375 μg, about 376 μg, about 377 μg, about 378 μg, about 379 μg, about 380 μg, about 381 μg, about 382 μg, about 383 μg, about 384 μg, about 385 μg, about 386 μg, about 387 μg, about 388 μg, about 389 μg, about 390 μg, about 391 μg, about 392 μg, about 393 μg, about 394 μg, about 395 μg, about 396 μg, about 397 μg, about 398 μg, about 399 μg, or about 400 μg of adjuvant. In embodiments, the methods comprise administering about 50 μg of adjuvant. In embodiments, the methods comprise administering about 75 μg of adjuvant.

### Example 1: Preparation of SARS-COV-2 S Glycoprotein Nanoparticles

[0301] SARS-COV-2 (“CoV”) Spike(S) glycoproteins (e.g., CoV S glycoproteins with amino acid sequences with at least 90%, at least 91%, at least 92%, at least 93%, at least 94%, at least 95%, at least 96%, at least 97%, at least 98%, at least 99%, or 100% identity to any one of SEQ ID NOS: 1-5, 38, 40-42, 44-46, 48-49, 51-52, 54, 56, 58-59, 61-67, 72, 74, 76, 77, 80-81, 84-89, 105-110, 112-115, 118, 121, 130, 132, 133, 134, 136, 137, 138, 140-141, 143, 144, 146, 147, 149, 151-153, 155-160, 167, 170, 173-192, 194-195, 200, 203, 207, 209, 211, 213, 215, 217-236, 242-328) were expressed in a baculovirus expression system. Recombinant plaques expressing the CoV S glycoproteins were picked and confirmed. The recombinant baculovirus was amplified by infection of Sf9 or rhabdovirus-free Sf22a insect cells. A culture of insect cells was infected at ˜0.6 MOI (Multiplicity of infection=virus ffu or pfu/cell) with baculovirus. The culture and supernatant were harvested 48-72 hrs post-infection. The crude cell harvest, approximately 30 mL, was clarified by centrifugation for 15 minutes at approximately 800× g. The resulting crude cell harvests containing the coronavirus Spike(S) protein were purified as nanoparticles as described below.

[0302] To produce nanoparticles, the non-ionic surfactant TERGITOL® nonylphenol ethoxylate NP-9 was used in the membrane protein extraction protocol. The crude extraction was further purified by passing through anion exchange chromatography, lentil lectin affinity/HIC and cation exchange chromatography. The washed cells were lysed by detergent treatment and then subjected to low pH treatment which leads to precipitation of BV and Sf9 host cell DNA and protein. The neutralized low pH treatment lysate was clarified and further purified on anion exchange and affinity chromatography before a second low pH treatment was performed.

[0303] Affinity chromatography was used to remove Sf9/BV proteins, DNA and NP-9, as well as to concentrate the CoV S glycoprotein. Lentil lectin is a metalloprotein containing calcium and manganese, which reversibly binds polysaccharides and glycosylated proteins containing glucose or mannose. The coronavirus Spike(S) protein-containing anion exchange flow through fraction was loaded onto the lentil lectin affinity chromatography resin (Capto Lentil Lectin, GE Healthcare). The glycosylated coronavirus Spike(S) protein was selectively bound to the resin while non-glycosylated proteins and DNA were removed in the column flow through. Weakly bound glycoproteins were removed with buffers containing high salt and low molar concentration of methyl alpha-D-mannopyranoside (MMP).

[0304] The column washes were used to detergent exchange the NP-9 detergent with the surfactant polysorbate 80 (PS80). The CoV S glycoproteins were eluted as nanoparticles from the lentil lectin column with a high concentration of MMP. After elution, the coronavirus Spike(S) protein trimers were assembled into nanoparticles composed of coronavirus Spike(S) protein trimers and PS80 contained in a detergent core.

### Example 2: Preparation of Immunogenic Compositions Comprising CoV S Glycoprotein Nanoparticles

[0305] Immunogenic compositions comprising one or more CoV S glycoproteins of Example 1 were prepared by suspending the CoV S glycoprotein in a pharmaceutically acceptable buffer (e.g., 25 mM sodium phosphate, 0.3 mM NaCl, about 0.03% PS80 at a pH of 7.2). A saponin adjuvant was optionally added to the composition. The saponin adjuvant contained two iscom particles: (i) a first iscom particle containing Fraction A of Quillaja Saponaria Molina and not Fraction C of Quillaja Saponaria Molina, and (ii) a second iscom particle containing Fraction C of Quillaja Saponaria Molina and not Fraction A of Quillaja Saponaria Molina. Fraction A and Fraction C accounted for 85% and 15% by weight, respectively, of the sum of the weights of fraction A of Quillaja Saponaria Molina and fraction C of Quillaja Saponaria Molina in the adjuvant.

### Example 3: Intranasal Administration of Immunogenic Compositions of Example 2 Results in a Superior Immune Response Against SARS-COV-2 Compared to Intramuscular Administration of the Same Compositions

[0306] The immune response resulting from intranasal and intramuscular boost with the compositions of Example 2 was compared.

[0307] Methods: BALB/c mice were administered an immunogenic composition containing a saponin adjuvant (5 μg), 1 μg of a first CoV S glycoprotein having the amino acid sequence of SEQ ID NO: 87, and 1 μg of a second CoV S glycoprotein of SEQ ID NO: 222 on days 0 and 14 (“primary series”). On day 48, mice were administered a boost dose of an immunogenic composition containing 1 μg of a CoV S glycoprotein of SEQ ID NO: 274 and optionally a saponin adjuvant intranasally or intramuscularly. FIG. 1 shows an image of the study design.

[0308] The saponin adjuvant contained two iscom particles: (i) a first iscom particle containing Fraction A of Quillaja Saponaria Molina and not Fraction C of Quillaja Saponaria Molina, and (ii) a second iscom particle containing Fraction C of Quillaja Saponaria Molina and not Fraction A of Quillaja Saponaria Molina. Fraction A and Fraction C accounted for 85% and 15% by weight, respectively, of the sum of the weights of fraction A of Quillaja Saponaria Molina and fraction C of Quillaja Saponaria Molina in the adjuvant.

[0309] Results: Intramuscular and intranasal boosting induced increased total anti-SARS-COV-2 S glycoprotein antibodies against SARS-COV-2 S glycoproteins from the SARS-COV-2 prototype strain (FIG. 2A, FIG. 2B), the SARS-COV-2 XBB.1.5 strain (FIG. 3A, FIG. 3B), the SARS-COV-2 XBB.1.16.6 strain (FIG. 4A, FIG. 4B), the SARS-COV-2 EG.5.1 IgG strain (FIG. 5A, FIG. 5B) compared to preboost in both the presence and absence of saponin adjuvant. Intramuscular and intranasal boosting also increased antibodies that neutralized pseudoviruses expressing SARS-CoV-2 S glycoprotein from the SARS-COV-2 XBB.1.5 strain (FIG. 6), from the SARS-COV-2 XBB.1.16.6 strain (FIG. 7), and from the SARS-COV-2 EG.5.1 strain (FIG. 8). Intramuscular and intranasal administration also induced IFN-γ secretion (FIG. 13), the production of triple Th1 CD4+ T cells (FIG. 14), the production of germinal center B cells (FIG. 15), and the production of Th1 Cytokine+CD8+ T cells (FIG. 16).

[0310] Surprisingly and unexpectedly, intranasal administration, but not intramuscular administration, induced secretion of anti SARS-COV-2 IgA and IgG antibodies in the bronchiole alveolar lavage (BAL), specific for SARS-COV-2 S glycoprotein from the SARS-COV-2 prototype strain (FIGS. 9A-9D), the SARS-COV-2 XBB.1.5 strain (FIGS. 10A-10D), or the SARS-COV-2 EG.5.1 strain (FIGS. 11A-11D). Secretion of anti-SARS-COV-2 IgA and IgG antibodies in the BAL was enhanced when compositions containing saponin adjuvant were administered. FIG. 12 shows that intranasal administration induces a 19.8 fold increase in neutralizing antibodies against a pseudovirus expressing the SARS-COV-2 S glycoprotein of XBB.1.5, whereas intramuscular administration only induces a 2.12 fold increase in neutralizing antibodies against the same pseudovirus.

[0311] Collectively, this data shows that intranasal administration of the immunogenic compositions described herein induces both mucosal and systemic immunity, whereas intramuscular administration primarily induces systemic immunity. The induction of mucosal immunity results in the stimulation of adaptive immune cells, such as CD4+ and CD8+ T cells and B cells that secrete IgA and IgG. The extent of induction of mucosal immunity is particularly remarkable here because the mucosal layer in the nasal environment contains proteolytic enzymes that would be expected to break down the SARS-COV-2 S glycoprotein in the composition. This is especially true given the structure of the nanoparticles, which present the glycoproteins from a detergent core, exposing them to the proteases. Flumist, which was withdrawn after becoming the only approved vaccine for nasal administration would, as a viral vector, have expressed proteins de novo intranasally and would thus have been predicted to be less vulnerable to nasal proteases. The fact that Flumist was withdrawn due to low efficacy further underscores the surprising nature of the strong immune response obtained with the nanoparticle approach disclosed herein.

### Example 4: Primary Intranasal Administration of Immunogenic Compositions

[0312] The immune response resulting from intranasal (IN) and intramuscular (IM) administration of the compositions of Example 2 is compared. Mice are intranasally or intramuscularly administered an immunogenic composition of Example 2 on day 0 and day 14. Mice are boosted intramuscularly or intranasally with an immunogenic composition 1 month from administration of the first dose of the immunogenic composition.

[0313] A saponin adjuvant is optionally added to each composition. The saponin adjuvant contained two iscom particles: (i) a first iscom particle containing Fraction A of Quillaja Saponaria Molina and not Fraction C of Quillaja Saponaria Molina, and (ii) a second iscom particle containing Fraction C of Quillaja Saponaria Molina and not Fraction A of Quillaja Saponaria Molina. Fraction A and Fraction C accounted for 85% and 15% by weight, respectively, of the sum of the weights of fraction A of Quillaja Saponaria Molina and fraction C of Quillaja Saponaria Molina in the adjuvant.

[0314] Exemplary compositions in the table below are evaluated.

| | | Primary Series (Days 0 and 14) | | | | Boost (1 month after administration of first dose) | | | |
|---|---|---|---|---|---|---|---|---|---|
| | | SARS-CoV-2 S | Amount of | Amount | | SARS-CoV-2 S | Amount of | Amount | |
| | | glycoproteins in | each SARS- | of | | glycoproteins in | SARS-CoV-2 | of | |
| | | immunogenic | CoV-2 S | saponin | | immunogenic | S | saponin | |
| Group | N | composition | glycoprotein | adjuvant | Route | composition | glycoprotein | adjuvant | Route |
| 1 | 8 | SARS-COV-2 S | 1 μg | 5 μg | IM | SARS-COV-2 S | 1 μg | 5 μg | IM |
| | | glycoproteins of | | | | glycoprotein of | | | |
| | | SEQ ID NO: 87 | | | | SEQ ID NO: | | | |
| | | (referred to as | | | | 274 (referred to | | | |
| | | “prototype”)and | | | | as “XBB.1.5”) | | | |
| | | SEQ ID NO: 222 | | | | | | | |
| | | (referred to as | | | | | | | |
| | | ″BA.5″) | | | | | | | |
| 2 | 8 | Prototype and | 1 μg | 5 μg | IN | XBB.1.5 | 1 μg | 5 μg | IN |
| | | BA.5 | | | | | | | |
| 3 | 8 | Prototype and | 5 μg | 5 μg | IN | XBB.1.5 | 5 μg | 5 μg | IN |
| | | BA.5 | | | | | | | |
| 4 | 8 | XBB.1.5 | 1 μg | 5 μg | IM | XBB.1.5 | 1 μg | 5 μg | IM |
| 5 | 8 | XBB.1.5 | 1 μg | 5μg | IN | XBB.1.5 | 1 μg | 5 μg | IN |
| 6 | 8 | XBB.1.5 | 5 μg | 5 μg | IN | XBB.1.5 | 5 μg | 5 μg | IN |
| 7 | 5 | Prototype and | 5 μg | 5 μg | IN | No booster | | | |
| | | BA.5 | | | | | | | |
| 8 | 5 | XBB.1.5 | 5 μg | 5 μg | IN | No booster | | | |
| 9 | 5 | Prototype and | 5 μg | 5 μg | IN | No booster | | | |
| | | BA.5 | | | | | | | |
| 10 | 5 | XBB.1.5 | 5 μg | 5 μg | IN | No booster | | | |

[0315] Serum and the bronchoalveolar lavage (BAL) of mice is collected. The amount of total IgG, IgA, and neutralizing antibodies in the serum and BAL are evaluated. The ratios of CD4+ to CD8+ T cells is also evaluated. Intracellular cytokine staining assays are performed to determine if CD4+ or CD8+ T cells secrete Type 1 cytokines (e.g., IFN-γ, TNF-α, IL-2) and/or Type 2 cytokines (CD4+ T cells). B cells are analyzed for germinal center formation (GL7+, CD95+).

[0316] Results: Bronchiole Alveolar Lavage: XBB.1.5 Primary and XBB.1.5 Boost-Intranasal Vaccination, Anti-XBB.1.5 IgG and IgA Responses, BAL XBB.1.5 IgG and IgA responses increased post intranasal boost (FIG. 20A, FIG. 20B) and Anti-JN.1 IgG and IgA Responses-BAL JN.1 IgG and IgA responses increased post intranasal boost (FIG. 21A, FIG. 21B). Bivalent BA.5 Primary and XBB.1.5 Boost-Intranasal: Anti-XBB.1.5 IgG and IgA Responses, BAL XBB.1.5 IgG and IgA responses increased post intranasal boost (FIG. 22A, FIG. 22B), and Anti-JN.1 IgG and IgA Responses, BAL JN.1 IgG and IgA responses increased post intranasal boost (FIG. 23A, FIG. 23B). Primary Two Dose of Bivalent BA.5 and XBB.1.5-Intranasal, Pseudovirus Neutralization Responses, Neutralization responses observed in BAL post Intranasal Primary Two dose (FIG. 24). Nasal Wash: XBB.1.5 Primary and XBB.1.5 Boost-Intranasal Vaccination, Anti-XBB.1.5 IgA Responses (FIG. 25), and Bivalent BA.5 Primary and XBB.1.5 Boost-Intranasal Vaccination, Anti-XBB.1.5 IgA Responses (FIG. 26).

[0317] Intracellular Cytokine Staining (ICCS) Assay results: Effector CD4+ T cells Th1/Th2 responses 21 days post primary two doses of Prototype+BA.5 (Intranasal) (5 μg rS+5 μg Matrix-M) versus XBB.1.5 (Intranasal) (5 μg rS+5 μg Matrix-M) (FIG. 27A, FIG. 27B), CD4+ T cells Th1/Th2 responses in BAL 21 days post primary dose Prototype+BA.5 (Intranasal) (5 μg rS+5 μg Matrix-M) versus XBB.1.5 (Intranasal) (5 μg rS+5 μg Matrix-M) (FIG. 28), CD8+ T cells Th1 responses in BAL 21 days post primary dose Prototype+BA.5 (Intranasal) (5 μg rS+5 μg Matrix-M) versus XBB.1.5 (Intranasal) (5 μg rS+5 μg Matrix-M) (FIG. 29). D4+ T cells Th1/Th2 responses to two doses of Bivalent BA.5 Primary followed by XBB.1.5 Intramuscular Boost (1 μg rS+5 μg Matrix-M) versus Bivalent BA.5 Primary followed by XBB.1.5 Intranasal Boost (1 μg rS+5 μg Matrix-M) (FIG. 30A, FIG. 30B), CD4+ T cells Th1/Th2 responses to two doses of Bivalent BA.5 Primary followed by XBB.1.5 Intranasal Boost (1 μg rS+5 μg Matrix-M) versus two doses of Bivalent BA.5 Primary followed by XBB.1.5 Intranasal Boost (5 μg rS+5 μg Matrix-M) (FIG. 31A, FIG. 31B). CD4+ T cells Th1/Th2 responses to two doses of XBB.1.5 Primary followed by XBB.1.5 Intramuscular Boost (1 μg rS+5 μg Matrix-M) versus two doses of XBB.1.5 Primary followed by XBB.1.5 Intranasal Boost (1 μg rS+5 μg Matrix-M) versus two doses of XBB.1.5 Primary followed by XBB.1.5 Intranasal Boost (5 μg rS+5 μg Matrix-M) (FIG. 32A, FIG. 32B, FIG. 32C). Triple Th1 CD4+ T cells response two doses of Bivalent BA.5 Primary followed by XBB.1.5 Intramuscular Boost (1 μg rS) versus two doses of Bivalent BA.5 Primary followed by XBB.1.5 Intranasal Boost (1 μg rS) versus two doses of Bivalent BA.5 Primary followed by XBB.1.5 Intranasal Boost (5 μg rS) (FIG. 33), and Triple Th1 CD4+ T cells response two doses of XBB.1.5 Primary followed by XBB.1.5 Intramuscular Boost (1 μg rS) versus two doses of XBB.1.5 Primary followed by XBB.1.5 Intranasal Boost (1 μg rS) versus two doses of XBB.1.5 Primary followed by XBB.1.5 Intranasal Boost (5 μg rS) (FIG. 34). T follicular helper cells (Tfh) and germinal center B cells in response to XBB.1.5 Boost following primary Bivalent BA.5 or XBB.1.5 (FIG. 37A, FIG. 37B). Bronchoalveolar lavage CD4+ T cells Th1/Th2 responses to post XBB.1.5 intranasal boost following primary Bivalent BA.5 or XBB.1.5 (FIG. 38A, FIG. 38B). Triple Th1 CD4+ T cells in spleen cells in response to intranasal vaccination of XBB.1.5 rS (5 μg rS+5 μg Matrix-M) at day 21, day 41 and day 56 using Intracellular Cytokine Staining (ICCS) assay (FIG. 39). CD8+ T cells Th1 responses to Primary and Boost with XBB.1.5 (5 μg rS) by intranasal vaccination (FIG. 40).

[0318] Peptide Pool Simulation: CD4+ T cells Th1/Th2 responses to intramuscular versus intranasal XBB.1.5 Boost following primary Prototype+BA.5 or XBB.1.5 (FIG. 35A, FIG. 35B), and CD8+ T cells Th1 responses to intramuscular versus intranasal XBB.1.5 Boost following primary Prototype+BA.5 or XBB.1.5 (FIG. 36A, FIG. 36B).

[0319] Collectively, this data shows that intranasal administration of the immunogenic compositions described herein induces both mucosal and systemic immunity, with increased immunogenic responses post Intranasal Boost.

### Example 5: Evaluation of Immunogenic Compositions in Rhesus Macaques

[0320] The ability of immunogenic compositions containing viral glycoprotein nanoparticles and optionally saponin adjuvant to induce an immune response when the compositions are delivered intranasally or intramuscularly is evaluated in Rhesus Macaques. The saponin adjuvant contained two iscom particles: (i) a first iscom particle containing Fraction A of Quillaja Saponaria Molina and not Fraction C of Quillaja Saponaria Molina, and (ii) a second iscom particle containing Fraction C of Quillaja Saponaria Molina and not Fraction A of Quillaja Saponaria Molina. Fraction A and Fraction C accounted for 85% and 15% by weight, respectively, of the sum of the weights of fraction A of Quillaja Saponaria Molina and fraction C of Quillaja Saponaria Molina in the adjuvant.

[0321] Exemplary compositions in the table below are evaluated.

| | | Primary Series | | | | | Boost 1 | | |
|---|---|---|---|---|---|---|---|---|---|
| | | Viral | | | | | Viral | | |
| | | glycoproteins | Amount | Amount | | | glycoproteins | Amount | Amount |
| | | in immunogenic | of Viral | of saponin | | Days | in immunogenic | of Viral | of saponin |
| Group | N | composition | glycoprotein | adjuvant | Route | Administered | composition | glycoprotein | adjuvant |
| 1 | 5 | SARS- | 5 μg | 50 μg | IM | Days 0 | SARS- | 1 μg | 5 μg |
| | | CoV-2 S | | | | and 21 | CoV-2 S | | |
| | | glycoprotein | | | | | glycoprotein | | |
| | | of SEQ ID NO: | | | | | of SEQ ID NO: | | |
| | | 87 (referred | | | | | 227 (referred | | |
| | | to as | | | | | to as “BQ.1.1”) | | |
| | | “prototype”) | | | | | | | |
| 2 | 5 | Prototype | 5 μg | 50 μg | IM | Days 0 | SARS- | 5 μg | 50 μg |
| | | | | | | and 21 | CoV-2 S | | |
| | | | | | | | glycoprotein | | |
| | | | | | | | of SEQ ID NO: | | |
| | | | | | | | 274 (referred | | |
| | | | | | | | to as “XBB.1.5”) | | |
| 3 | 5 | SARS- | 5 μg | 50 μg | IM | Days 0 | XBB.1.5 | 5 μg | 50 μg |
| | | CoV-2 S | | | | and 21 | | | |
| | | glycoprotein | | | | | | | |
| | | of SEQ ID NO: | | | | | | | |
| | | 222 (referred | | | | | | | |
| | | to as BA.5) | | | | | | | |
| 4 | 5 | Prototype | 5 μg | 50 μg | IM | Days 0 | XBB.1.5 | 5 μg | 50 μg |
| | | and BA.5 | | | | and 21 | | | |
| 5 | 8 | XBB.1.5 | 5 μg | 50 μg | IM | Days 0 | XBB.1.5 | 5 μg | 50 μg |
| | | | | | | and 21 | | | |
| 6 | 8 | XBB.1.5 | 5 μg | 50 μg | IM | Days 0 | XBB.1.5 | 25 μg | 50 μg |
| | | | | | | and 21 | | | |

| | | | Boost 2 | | | | |
|---|---|---|---|---|---|---|---|
| | | | Viral | | | | |
| | Boost 1 | | glycoproteins | Amount | Amount | | |
| | | Days | in immunogenic | of Viral | of saponin | | Days |
| Group | Route | Administered | composition | glycoprotein | adjuvant | Route | Administered |
| 1 | IM | Day 246 | RSV F | 240 μg | 50 μg | IN | 447 |
| | | | glycoprotein | | | | |
| | | | of SEQ ID NO: | | | | |
| | | | 337 | | | | |
| 2 | IM | Day 246 | RSV F | 60 μg | 50 μg | IM | 447 |
| | | | glycoprotein | | | | |
| | | | of SEQ ID NO: | | | | |
| | | | 337 | | | | |
| 3 | IM | Day 246 | Hemagglutinin | 25 μg | 75 μg | IN | 447 |
| | | | (HA) from four | XBB.1.5 | | | |
| | | | different | and 240 μg | | | |
| | | | influenza | of HA per | | | |
| | | | strains | strain | | | |
| | | | and XBB.1.5 | | | | |
| 4 | IM | Day 246 | Hemagglutinin | 5 μg | 75 μg | IM | 447 |
| | | | (HA) from four | XBB.1.5 | | | |
| | | | different | and 60 μg | | | |
| | | | influenza | of HA per | | | |
| | | | strains | strain | | | |
| | | | and XBB.1.5 | | | | |

| | | | |
|---|---|---|---|
| 5 | IM | Day 202 | To be determined |
| 6 | IN | Day 202 | To be determined |

[0322] The immunogenic compositions of Boost 2 for Groups 1 and 2 are formulated in a buffer containing 22 mM sodium phosphate, 150 mM NaCl, 1% w/w histidine, and 0.03% w/w PS80 at a pH of 6.8. The immunogenic compositions of Boost 2 for Groups 3 and 4 are formulated in a buffer containing 25 mM sodium phosphate, 225 mM NaCl, 500 mM arginine-HCl, 2.5% w/w trehalose, and 0.03% w/w PS80 at a pH of 7.3. The immunogenic compositions of Boost 1 for Groups 5 and 6 are formulated in a buffer containing 25 mM sodium phosphate, 300 mM NaCl, 0.01% w/w PS80 at a pH of 7.2.

[0323] Serum, nasal wash, PBMCs, the bronchoalveolar lavage (BAL) of the Rhesus macaques are collected. The amount of total IgG, IgA, and neutralizing antibodies in the serum and BAL are evaluated. The ratios of CD4+ to CD8+ T cells is also evaluated. Intracellular cytokine staining assays are performed to determine if CD4+ or CD8+ T cells secrete Type 1 cytokines (e.g., IFN-Y, TNF-α, IL-2) and/or Type 2 cytokines (CD4+ T cells). B cells are analyzed for germinal center formation (GL7+, CD95+).

[0324] FIG. 17 is a timeline of the experiments for Groups 1˜4 and FIG. 18 is a timeline of the experiments for Groups 5-6.

[0325] Anti-SARS-COV-2 S glycoprotein antibodies, anti-RSV F glycoprotein antibodies, influenza hemagglutination inhibition (HAI) titer, and pseudovirus neutralization titers are measured before and after immunization. The level of IgA versus IgG antibodies is also quantitated. The cellular response to immunization is also evaluated. For example, the number of CD4+ Th1 and Th2 cells is quantitated.

### Enumerated Embodiments

[0326] 1. An intranasal immunogenic composition, comprising:
   [0327] (i) a glycoprotein nanoparticle comprising a non-ionic detergent and a viral glycoprotein comprising a transmembrane domain, wherein the viral glycoprotein is anchored to the detergent core via the transmembrane domain of the viral glycoprotein; and
   [0328] (ii) a pharmaceutically acceptable buffer.
[0329] 2. The intranasal immunogenic composition of enumerated embodiment 1, wherein the viral glycoprotein is selected from one or more of a hemagglutinin (HA) glycoprotein, a SARS-COV-2 Spike(S) glycoprotein, and a respiratory syncytial virus (RSV) fusion (F) glycoprotein.
[0330] 3. The intranasal immunogenic composition of enumerated embodiment 1 or 2, comprising from 1 to about 20, from 1 to about 19, from 1 to about 18, from 1 to about 17, from 1 to about 16, from 1 to about 15, from 1 to about 14, from 1 to about 13, from 1 to about 12, from 1 to about 11, from 1 to about 10, from 1 to about 9, from 1 to about 8, from 1 to about 7, from 1 to about 6, from 1 to about 5, from 1 to about 4, from 1 to about 3, from 1 to about 2, from about 2 to about 20, from about 2 to about 19, from about 2 to about 18, from about 2 to about 17, from about 2 to about 16, from about 2 to about 15, from about 2 to about 14, from about 2 to about 13, from about 2 to about 12, from about 2 to about 11, from about 2 to about 10, from about 2 to about 9, from about 2 to about 8, from about 2 to about 7, from about 2 to about 6, from about 2 to about 5, from about 2 to about 4, from about 2 to about 3, from about 3 to about 20, from about 3 to about 19, from about 3 to about 18, from about 3 to about 17, from about 3 to about 16, from about 3 to about 15, from about 3 to about 14, from about 3 to about 13, from about 3 to about 12, from about 3 to about 11, from about 3 to about 10, from about 3 to about 9, from about 3 to about 8, from about 3 to about 7, from about 3 to about 6, from about 3 to about 5, from about 3 to about 4, from about 4 to about 20, from about 4 to about 19, from about 4 to about 18, from about 4 to about 17, from about 4 to about 16, from about 4 to about 15, from about 4 to about 14, from about 4 to about 13, from about 4 to about 12, from about 4 to about 11, from about 4 to about 10, from about 4 to about 9, from about 4 to about 8, from about 4 to about 7, from about 4 to about 6, from about 4 to about 5, from about 5 to about 20, from about 5 to about 19, from about 5 to about 18, from about 5 to about 17, from about 5 to about 16, from about 5 to about 15, from about 5 to about 14, from about 5 to about 13, from about 5 to about 12, from about 5 to about 11, from about 5 to about 10, from about 5 to about 9, from about 5 to about 8, from about 5 to about 7, from about 5 to about 6, from about 6 to about 20, from about 6 to about 19, from about 6 to about 18, from about 6 to about 17, from about 6 to about 16, from about 6 to about 15, from about 6 to about 14, from about 6 to about 13, from about 6 to about 12, from about 6 to about 11, from about 6 to about 10, from about 6 to about 9, from about 6 to about 8, from about 6 to about 7, from about 7 to about 20, from about 7 to about 19, from about 7 to about 18, from about 7 to about 17, from about 7 to about 16, from about 7 to about 15, from about 7 to about 14, from about 7 to about 13, from about 7 to about 12, from about 7 to about 11, from about 7 to about 10, from about 7 to about 9, from about 7 to about 8, from about 8 to about 20, from about 8 to about 19, from about 8 to about 18, from about 8 to about 17, from about 8 to about 16, from about 8 to about 15, from about 8 to about 14, from about 8 to about 13, from about 8 to about 12, from about 8 to about 11, from about 8 to about 10, from about 8 to about 9, from about 9 to about 20, from about 9 to about 19, from about 9 to about 18, from about 9 to about 17, from about 9 to about 16, from about 9 to about 15, from about 9 to about 14, from about 9 to about 13, from about 9 to about 12, from about 9 to about 11, from about 9 to about 10, from about 10 to about 20, from about 10 to about 19, from about 10 to about 18, from about 10 to about 17, from about 10 to about 16, from about 10 to about 15, from about 10 to about 14, from about 10 to about 13, from about 10 to about 12, from about 10 to about 11, from about 11 to about 20, from about 11 to about 19, from about 11 to about 18, from about 11 to about 17, from about 11 to about 16, from about 11 to about 15, from about 11 to about 14, from about 11 to about 13, from about 11 to about 12, from about 12 to about 20, from about 12 to about 19, from about 12 to about 18, from about 12 to about 17, from about 12 to about 16, from about 12 to about 15, from about 12 to about 14, from about 12 to about 13, from about 13 to about 20, from about 13 to about 19, from about 13 to about 18, from about 13 to about 17, from about 13 to about 16, from about 13 to about 15, from about 13 to about 14, from about 14 to about 20, from about 14 to about 19, from about 14 to about 18, from about 14 to about 17, from about 14 to about 16, from about 14 to about 15, from about 15 to about 20, from about 15 to about 19, from about 15 to about 18, from about 15 to about 17, from about 15 to about 16, from about 16 to about 20, from about 16 to about 19, from about 16 to about 18, from about 16 to about 17, from about 17 to about 20, from about 17 to about 19, from about 17 to about 18, from about 18 to about 20, from about 18 to about 19, or from about 19 to about 20 glycoprotein nanoparticles.
[0331] 4. The intranasal immunogenic composition of enumerated embodiment 3, wherein each nanoparticle comprises a different viral glycoprotein.
[0332] 5. The intranasal immunogenic composition of enumerated embodiment 3, wherein each nanoparticle comprises from 1 to about 5 different viral glycoproteins.
[0333] 6. The intranasal immunogenic composition of any one of enumerated embodiments 1-3, comprising a nanoparticle comprising two different viral glycoproteins.
[0334] 7. The intranasal immunogenic composition of any one of enumerated embodiments 1-3, comprising a nanoparticle comprising three different viral glycoproteins.
[0335] 8. The intranasal immunogenic composition of any one of enumerated embodiments 1-3, comprising a nanoparticle comprising four different viral glycoproteins.
[0336] 9. The intranasal immunogenic composition of any one of enumerated embodiments 1-8, wherein the viral glycoprotein is an RSV F glycoprotein.
[0337] 10. The intranasal immunogenic composition of enumerated embodiment 9, wherein the RSV F glycoprotein comprises at least 80%, at least 81%, at least 82%, at least 83%, at least 84%, at least 85%, at least 86%, at least 87%, at least 88%, at least 89%, at least 90%, at least 91%, at least 92%, at least 93%, at least 94%, at least 95%, at least 96%, at least 97%, at least 98%, at least 99%, or at least 100% identity to a polypeptide of any one of SEQ ID NOS: 331-340.
[0338] 11. The intranasal immunogenic composition of enumerated embodiment 9, wherein the RSV F glycoprotein comprises at least 80%, at least 81%, at least 82%, at least 83%, at least 84%, at least 85%, at least 86%, at least 87%, at least 88%, at least 89%, at least 90%, at least 91%, at least 92%, at least 93%, at least 94%, at least 95%, at least 96%, at least 97%, at least 98%, at least 99%, or at least 100% identity to a polypeptide of SEQ ID NO: 331.
[0339] 12. The intranasal immunogenic composition of enumerated embodiment 9, wherein the RSV F glycoprotein comprises at least 80%, at least 81%, at least 82%, at least 83%, at least 84%, at least 85%, at least 86%, at least 87%, at least 88%, at least 89%, at least 90%, at least 91%, at least 92%, at least 93%, at least 94%, at least 95%, at least 96%, at least 97%, at least 98%, at least 99%, or at least 100% identity to a polypeptide of 337.
[0340] 13. The intranasal immunogenic composition of any one of enumerated embodiments 9-12, comprising from 30 μg to about 300 μg of the RSV F glycoprotein.
[0341] 14. The intranasal immunogenic composition of any one of enumerated embodiments 9-12, comprising about 60 μg of the RSV F glycoprotein.
[0342] 15. The intranasal immunogenic composition of any one of enumerated embodiments 9-12, comprising about 240 μg of the RSV F glycoprotein.
[0343] 16. The intranasal immunogenic composition of any one of enumerated embodiments 1-8, wherein the viral glycoprotein is a SARS-COV-2 S glycoprotein.
[0344] 17. The intranasal immunogenic composition of enumerated embodiment 16, wherein the SARS-COV-2 S glycoprotein contains (i) an inactive furin cleavage site, and (ii) proline at amino acid positions 973 and 974, wherein the SARS-COV-2 glycoprotein is numbered according to the polypeptide of SEQ ID NO: 2.
[0345] 18. The intranasal immunogenic composition of enumerated embodiments 17, wherein the inactive furin cleavage site has an amino acid sequence selected from any one of: 7-34, 97, and 111.
[0346] 19. The intranasal immunogenic composition of enumerated embodiment 17, wherein the inactive furin cleavage site has the amino acid sequence of QQAQ (SEQ ID NO: 7).
[0347] 20. The intranasal immunogenic composition of enumerated embodiment 16, wherein the SARS-COV-2 S glycoprotein has at least 90% identity to the SARS-COV-2 S glycoprotein of SEQ ID NO: 87.
[0348] 21. The intranasal immunogenic composition of enumerated embodiment 16, wherein the SARS-COV-2 S glycoprotein has at least 90% identity to the SARS-COV-2 S glycoprotein of SEQ ID NO: 274.
[0349] 22. The intranasal immunogenic composition of enumerated embodiment 14, wherein the SARS-COV-2 S glycoprotein has at least 80%, at least 81%, at least 82%, at least 83%, at least 84%, at least 85%, at least 86%, at least 87%, at least 88%, at least 89%, at least 90%, at least 91%, at least 92%, at least 93%, at least 94%, at least 95%, at least 96%, at least 97%, at least 98%, at least 99%, or at least 100% identity to a polypeptide of any one of SEQ ID NOS: 87, 89, 106, 112, 113, 114, 115, 132, 144, 151, 153, 156, 158, 174, 175, 176, 181, 182, 183, 184, 186, 188, 190, 192, 195, 217, 218, 219, 220, 221, 222, 223, 224, 225, 226, 227, 228, 233, 234, 235, 236, 260, 261, 262, 263, 264, 274, 276, 278, 280, 284, 288, 292, 296, 300, 304, 308, 312, 316, 320, 324, 363, and 328.
[0350] 23. The intranasal immunogenic composition of any one of enumerated embodiments 16-22, comprising from about 1 μg to about 175 μg of the SARS-COV-2 S glycoprotein.
[0351] 24. The intranasal immunogenic composition of any one of enumerated embodiments 16-22, comprising about 5 μg of the SARS-COV-2 S glycoprotein.
[0352] 25. The intranasal immunogenic composition of any one of enumerated embodiments 16-22, comprising about 25 μg of the SARS-COV-2 S glycoprotein.
[0353] 26. The intranasal immunogenic composition of any one of enumerated embodiments 1-8, wherein the viral glycoprotein is a HA glycoprotein.
[0354] 27. The intranasal immunogenic composition of enumerated embodiment 26, wherein the amino acid sequence of the HA glycoprotein has 100% identity to the amino acid sequence of the native HA glycoprotein.
[0355] 28. The intranasal immunogenic composition of enumerated embodiment 26 or 27, wherein the HA glycoprotein has a subtype selected from the group consisting of H1, H3, H4, H5, and H7.
[0356] 29. The intranasal immunogenic composition of any one of enumerated embodiments 26-28, comprising a first, second, and third hemagglutinin (HA) glycoprotein, wherein each HA glycoprotein is from a different influenza strain.
[0357] 30. The intranasal immunogenic composition of enumerated embodiment 29, comprising a fourth HA glycoprotein, wherein the fourth HA glycoprotein is from a different influenza strain than the first, second, and third HA glycoprotein.
[0358] 31. The intranasal immunogenic composition of enumerated embodiment 29 or 30, comprising a detergent core nanoparticle comprising the first HA glycoprotein and a non-ionic detergent.
[0359] 32. The intranasal immunogenic composition of enumerated embodiment 29 or 30, comprising a HaSMaN comprising the first HA glycoprotein.
[0360] 33. The intranasal immunogenic composition of any one of enumerated embodiments 26-30, comprising:
   [0361] (i) a first detergent-core nanoparticle comprising the first HA glycoprotein and a non-ionic detergent;
   [0362] (i) a second detergent-core nanoparticle comprising the second HA glycoprotein and the non-ionic detergent; and
   [0363] (iii) a third detergent-core nanoparticle comprising the second HA glycoprotein and the non-ionic detergent.
[0364] 34. The intranasal immunogenic composition of enumerated embodiment 33, comprising: (iv) a fourth detergent-core nanoparticle comprising a fourth HA glycoprotein and a non-ionic detergent.
[0365] 35. The intranasal immunogenic composition of any one of enumerated embodiments 26-30, comprising:
   [0366] (i) a detergent-core nanoparticle comprising the first HA glycoprotein and a non-ionic detergent; and
   [0367] (ii) a HaSMaN comprising the second HA glycoprotein.
[0368] 36. The intranasal immunogenic composition of any one of enumerated embodiments 26-30, comprising:
   [0369] (i) a detergent-core nanoparticle comprising the first HA glycoprotein and a non-ionic detergent;
   [0370] (ii) a HaSMaN comprising the second HA glycoprotein; and
   [0371] (iii) a second HaSMaN comprising the third HA glycoprotein.
[0372] 37. The intranasal immunogenic composition of enumerated embodiment 30, comprising:
   [0373] (i) a detergent-core nanoparticle comprising the first HA glycoprotein and a non-ionic detergent;
   [0374] (ii) a HaSMaN comprising the second HA glycoprotein;
   [0375] (iii) a second HaSMaN comprising the third HA glycoprotein; and
   [0376] (iii) a third HaSMaN comprising the fourth HA glycoprotein.
[0377] 38. The intranasal immunogenic composition of any one of enumerated embodiments 33-37, wherein the HA glycoproteins of the detergent-core nanoparticles is from a Type A influenza strain.
[0378] 39. The intranasal immunogenic composition of any one of enumerated embodiments 33-37, wherein the HA glycoproteins of the detergent-core nanoparticles is from a Type B influenza strain.
[0379] 40. The intranasal immunogenic composition of any one of enumerated embodiments 35-37, wherein the HA glycoproteins of the HaSMaNs are from a Type A influenza strain.
[0380] 41. The intranasal immunogenic composition of any one of enumerated embodiments 26-40, comprising from about 30 μg to about 300 μg of each HA glycoprotein.
[0381] 42. The intranasal immunogenic composition of any one of enumerated embodiments 26-40, comprising about 60 μg of each HA glycoprotein.
[0382] 43. The intranasal immunogenic composition of any one of enumerated embodiments 26-40, comprising about 240 μg of each HA glycoprotein.
[0383] 44. The intranasal immunogenic composition of any one of enumerated embodiments 1-43, comprising from 1 to about 10 SARS-COV-2 S glycoproteins and from 1 to about 5 HA glycoproteins.
[0384] 45. The intranasal immunogenic composition of any one of enumerated embodiments 1-43, comprising from 1 to about 10 RSV F glycoproteins and from 1 to about 5 HA glycoproteins.
[0385] 46. The intranasal immunogenic composition of any one of enumerated embodiments 1-43, comprising from 1 to about 10 SARS-COV-2 S glycoproteins and from 1 to about 5 RSV F glycoproteins.
[0386] 47. The intranasal immunogenic composition of any one of enumerated embodiments 1-43, comprising from 1 to about 10 SARS-COV-2 S glycoproteins, from 1 to about 5 HA glycoproteins, and from 1 to about 5 RSV F glycoproteins.
[0387] 48. The intranasal immunogenic composition of enumerated embodiment 44 or enumerated embodiment 47, comprising from about 5 μg to about 60 μg of each HA glycoprotein and from about 2.5 μg to about 35 μg of SARS-COV-2 S glycoprotein.
[0388] 49. The intranasal immunogenic composition of enumerated embodiment 48, comprising from about 2.5 μg to about 22.5 μg of SARS-COV-2 S glycoprotein.
[0389] 50. The intranasal immunogenic composition of enumerated embodiment 48, comprising from about 15 μg to about 35 μg of SARS-COV-2 S glycoprotein.
[0390] 51. The intranasal immunogenic composition of enumerated embodiment 48, comprising from about 30 μg to about 60 μg of each HA glycoprotein.
[0391] 52. The intranasal immunogenic composition of enumerated embodiment 48, comprising from about 24 μg to about 40 μg of each HA glycoprotein and from about 5 μg to about 50 μg of SARS-CoV-2 S glycoprotein.
[0392] 53. The intranasal immunogenic composition of enumerated embodiment 48, comprising about 33 μg of each HA glycoprotein and about 25 μg of SARS-COV-2 S glycoprotein.
[0393] 54. The intranasal immunogenic composition of enumerated embodiment 48, comprising about 54 μg of each HA glycoprotein and about 25 μg of SARS-COV-2 S glycoprotein.
[0394] 55. The intranasal immunogenic composition of enumerated embodiment 48, comprising about 39 μg of each HA glycoprotein and about 13 μg of SARS-COV-2 S glycoprotein.
[0395] 56. The intranasal immunogenic composition of enumerated embodiment 48, comprising from about 30 μg to about 40 μg of each HA glycoprotein and about 20 μg of SARS-COV-2 S glycoprotein.
[0396] 57. The intranasal immunogenic composition of enumerated embodiment 48, comprising from about 33 μg to about 39 μg of each HA glycoprotein and from about 14 μg to about 15 μg of SARS-COV-2 S glycoprotein.
[0397] 58. The intranasal immunogenic composition of enumerated embodiment 48, comprising about 30 μg of each HA glycoprotein and about 25 μg of SARS-COV-2 S glycoprotein.
[0398] 59. The intranasal immunogenic composition of enumerated embodiment 48, comprising about 60 μg of each HA glycoprotein and about 35 μg of SARS-COV-2 S glycoprotein.
[0399] 60. The intranasal immunogenic composition of enumerated embodiment 48, comprising about 60 μg of each HA glycoprotein and about 5 μg of SARS-COV-2 S glycoprotein.
[0400] 61. The intranasal immunogenic composition of enumerated embodiment 48, comprising about 240 μg of each HA glycoprotein and about 25 μg of SARS-COV-2 S glycoprotein.
[0401] 62. The intranasal immunogenic composition of any one of enumerated embodiments 45-61, comprising from about 30 μg to about 300 μg of RSV F glycoprotein.
[0402] 63. The intranasal immunogenic composition of enumerated embodiment 62, comprising about 60 μg of RSV F glycoprotein.
[0403] 64. The intranasal immunogenic composition of enumerated embodiment 62, comprising about 240 μg of RSV F glycoprotein.
[0404] 65. The intranasal immunogenic composition of any one of enumerated embodiments 1-64, wherein the pharmaceutically acceptable buffer comprises one or more of sodium phosphate and sodium chloride.
[0405] 66. The intranasal immunogenic composition of enumerated embodiment 65, wherein the pharmaceutically acceptable buffer comprises from about 15 mM to about 50 mM sodium phosphate.
[0406] 67. The intranasal immunogenic composition of enumerated embodiment 65 or 66, wherein the pharmaceutically acceptable buffer comprises from about 150 to about 250 mM sodium chloride.
[0407] 68. The intranasal immunogenic composition of any one of enumerated embodiments 1-66, wherein the pharmaceutically acceptable buffer comprises about 25 mM sodium phosphate and about 0.3 M NaCl.
[0408] 69. The intranasal immunogenic composition of any one of enumerated embodiments 1-68, wherein the non-ionic detergent is selected from the group consisting of polysorbate-20 (PS20), polysorbate-40 (PS40), polysorbate-60 (PS60), polysorbate-65 (PS65), and polysorbate-80 (PS80).
[0409] 70. The intranasal immunogenic composition of enumerated embodiment 69, wherein the non-ionic detergent is PS80.
[0410] 71. The intranasal immunogenic composition of enumerated embodiment 70, comprising about 0.03% PS80 by weight.
[0411] 72. The intranasal immunogenic composition of enumerated embodiment 71, comprising from about 0.01% to about 0.5% PS80 by weight.
[0412] 73. The intranasal immunogenic composition of any one of enumerated embodiments 1-72, comprising an adjuvant.
[0413] 74. The intranasal immunogenic composition of enumerated embodiment 73, wherein the adjuvant is a saponin adjuvant.
[0414] 75. The intranasal immunogenic composition of enumerated embodiment 74, wherein the saponin adjuvant comprises:
   [0415] (i) a first iscom particle comprising fraction A of Quillaja Saponaria Molina and not fraction C of Quillaja Saponaria Molina; and
   [0416] (ii) a second iscom particle comprising fraction C of Quillaja Saponaria Molina and not fraction A of Quillaja Saponaria Molina.
[0417] 76. The intranasal immunogenic composition of enumerated embodiment 75, wherein fraction A of Quillaja Saponaria Molina and fraction C of Quillaja Saponaria Molina account for about 85% by weight and about 15% by weight, respectively, of the sum of the weights of fraction A of Quillaja Saponaria Molina and fraction C of Quillaja Saponaria Molina in the saponin adjuvant.
[0418] 77. The intranasal immunogenic composition of enumerated embodiment 75, wherein fraction A of Quillaja Saponaria Molina accounts for at least about 70% by weight of the sum of the weights of Fraction A of Quillaja Saponaria Molina and fraction C of Quillaja Saponaria Molina in the saponin adjuvant, and wherein fraction C accounts for the remainder.
[0419] 78. The intranasal immunogenic composition of any one of enumerated embodiments 1-77, comprising a volume of about 0.05 mL to about 1 mL.
[0420] 79. The intranasal immunogenic composition of any one of enumerated embodiments 1-78, comprising a volume of about 0.2 mL.
[0421] 80. The intranasal immunogenic composition of any one of enumerated embodiments 1-78, comprising a volume of about 0.5 mL.
[0422] 81. The intranasal immunogenic composition of any one of enumerated embodiments 1-78, comprising a volume of about 0.25 mL 82. The intranasal immunogenic composition of any one of enumerated embodiments 73-81, comprising from about 50 μg to about 200 μg, from about 50 μg to about 150 μg, from about 50 μg to about 100 μg, or from about 50 μg to about 75 μg adjuvant.
[0423] 83. The intranasal immunogenic composition of any one of enumerated embodiments 73-81, comprising about 50 μg adjuvant.
[0424] 84. The intranasal immunogenic composition of any one of enumerated embodiments 73-81, comprising about 75 μg adjuvant.
[0425] 85. The intranasal immunogenic composition of any one of enumerated embodiments 73-81, comprising about 100 μg adjuvant.
[0426] 86. The intranasal immunogenic composition of any one of enumerated embodiments 1-85, wherein the total concentration of viral glycoproteins in the composition is from about 10 μg/mL to about 4 mg/mL.
[0427] 87. The intranasal immunogenic composition of any one of enumerated embodiments 1-85, wherein the total concentration of viral glycoproteins in the composition is from about 10 μg/mL to about 50 μg/mL.
[0428] 88. The intranasal immunogenic composition of any one of enumerated embodiments 1-85, wherein the total concentration of viral glycoproteins in the composition is from about 120 μg/mL to about 600 μg/mL.
[0429] 89. The intranasal immunogenic composition of any one of enumerated embodiments 1-85, wherein the total concentration of viral glycoproteins in the composition is from about 600 μg/mL to about 3 mg/mL.
[0430] 90. The intranasal immunogenic composition of any one of enumerated embodiments 1-89, wherein the composition is atomized.
[0431] 91. The intranasal immunogenic composition of any one of enumerated embodiments 1-89, wherein the composition is aerosolized.
[0432] 92. A prefilled syringe comprising the intranasal immunogenic composition of any one of enumerated embodiments 1-91.
[0433] 93. A dry powder composition comprising a dried intranasal immunogenic composition of any one of enumerated embodiments 1-91.
[0434] 94. An aerosol comprising an intranasal immunogenic composition of any one of enumerated embodiments 1-91.
[0435] 95. An intranasal delivery device comprising the dry powder composition of enumerated embodiment 91.
[0436] 96. An intranasal delivery device comprising the aerosol of enumerated embodiment 94.
[0437] 97. The intranasal delivery device of enumerated embodiment 96, wherein the aerosol is a dry powder.
[0438] 98. The intranasal delivery device of enumerated embodiment 96, wherein the aerosol is a liquid.
[0439] 99. An intranasal delivery device comprising the intranasal immunogenic composition of enumerated embodiment 90.
[0440] 100. An intranasal delivery device comprising a suspension comprising an intranasal immunogenic composition of any one of enumerated embodiments 1-91.
[0441] 101. A method of stimulating an immune response against SARS-COV-2, influenza, RSV, or a combination thereof in a patient comprising intranasally administering the intranasal immunogenic composition of any one of enumerated embodiments 1-91 to a patient.
[0442] 102. A method of inducing mucosal immunity against SARS-COV-2, influenza, RSV, or a combination thereof in a patient comprising intranasally administering the intranasal immunogenic composition of any one of enumerated embodiments 1-91.
[0443] 103. A method of inducing production of neutralizing antibodies against SARS-COV-2, influenza, RSV, or a combination thereof in a patient comprising administering to the patient the intranasal immunogenic composition of any one of enumerated embodiments 1-91.
[0444] 104. A method of stimulating an immune response against SARS-COV-2, influenza, RSV, or a combination thereof in the nasal cavity of a patient, comprising administering the intranasal immunogenic composition of any one of enumerated embodiments 1-91.
[0445] 105. The method of any one of enumerated embodiments 101-104, wherein the method induces the production of neutralizing antibodies against SARS-COV-2, influenza, RSV, or a combination thereof in the bronchoalveolar lavage of the subject.
[0446] 106. The method of enumerated embodiment 103 or 105, wherein the neutralizing antibodies are IgA antibodies.
[0447] 107. The method of enumerated embodiment 103 or 105, wherein the neutralizing antibodies are IgG antibodies.
[0448] 108. The method of any one of enumerated embodiments 101-107, wherein the patient has previously been administered an immunogenic composition intramuscularly.
[0449] 109. The method of any one of enumerated embodiments 101-108, comprising administering 0.25 mL of the intranasal immunogenic composition to each nostril of the patient.
[0450] 110. The method of any one of enumerated embodiments 101-109, wherein the composition is administered as a mist.

What is claimed:

1. An intranasal immunogenic composition, comprising:
(i) a glycoprotein nanoparticle comprising a non-ionic detergent core and a viral glycoprotein comprising a transmembrane domain, wherein the viral glycoprotein is anchored to the detergent core via the transmembrane domain of the viral glycoprotein; and
(ii) a pharmaceutically acceptable buffer.

2. The intranasal immunogenic composition of claim 1, wherein the viral glycoprotein is selected from one or more of a hemagglutinin (HA) glycoprotein, a SARS-COV-2 Spike(S) glycoprotein, and a respiratory syncytial virus (RSV) fusion (F) glycoprotein.

3. The intranasal immunogenic composition of claim 1, wherein the glycoprotein nanoparticle comprises two different viral glycoproteins.

4. The intranasal immunogenic composition of claim 1, wherein the viral glycoprotein comprises an RSV F glycoprotein having at least 80%, at least 81%, at least 82%, at least 83%, at least 84%, at least 85%, at least 86%, at least 87%, at least 88%, at least 89%, at least 90%, at least 91%, at least 92%, at least 93%, at least 94%, at least 95%, at least 96%, at least 97%, at least 98%, at least 99%, or at least 100% identity to a polypeptide of any one of SEQ ID NOS: 331-340.

5. The intranasal immunogenic composition of claim 4, comprising from 30 μg to about 300 μg of the RSV F glycoprotein.

6. The intranasal immunogenic composition of claim 1, wherein the viral glycoprotein comprises a SARS-COV-2 S glycoprotein containing (i) an inactive furin cleavage site, and (ii) proline at amino acid positions 973 and 974, wherein the SARS-COV-2 glycoprotein is numbered according to the polypeptide of SEQ ID NO: 2.

7. The intranasal immunogenic composition of claim 6, wherein the SARS-COV-2 S glycoprotein has at least 80%, at least 81%, at least 82%, at least 83%, at least 84%, at least 85%, at least 86%, at least 87%, at least 88%, at least 89%, at least 90%, at least 91%, at least 92%, at least 93%, at least 94%, at least 95%, at least 96%, at least 97%, at least 98%, at least 99%, or at least 100% identity to a polypeptide of any one of SEQ ID NOS: 87, 89, 106, 112, 113, 114, 115, 132, 144, 151, 153, 156, 158, 174, 175, 176, 181, 182, 183, 184, 186, 188, 190, 192, 195, 217, 218, 219, 220, 221, 222, 223, 224, 225, 226, 227, 228, 233, 234, 235, 236, 260, 261, 262, 263, 264, 274, 276, 278, 280, 284, 288, 292, 296, 300, 304, 308, 312, 316, 320, 324, 363 and 328.

8. The intranasal immunogenic composition of claim 6, comprising from about 1 μg to about 175 μg of the SARS-COV-2 S glycoprotein.

9. The intranasal immunogenic composition of claim 1, wherein the viral glycoprotein is a HA glycoprotein having a subtype selected from the group consisting of H1, H3, H4, H5, and H7.

10. The intranasal immunogenic composition of claim 9, wherein the HA glycoproteins of the detergent-core nanoparticles are from a Type A influenza strain or a Type B influenza strain.

11. The intranasal immunogenic composition of claim 9, wherein each HA glycoprotein present in the composition is present in an amount from about 30 μg to about 300 μg.

12. The intranasal immunogenic composition of claim 1, comprising between 1 to 10 SARS-CoV-2 S glycoproteins and from between 1 and 5 HA glycoproteins.

13. The intranasal immunogenic composition of claim 1, comprising between 1 to and 10 RSV F glycoproteins and between 1 and 5 HA glycoproteins.

14. The intranasal immunogenic composition of claim 1, comprising between 1 to 10 SARS-CoV-2 S glycoproteins and from 1 to 5 RSV F glycoproteins.

15. The intranasal immunogenic composition of claim 1, wherein the pharmaceutically acceptable buffer comprises one or more of sodium phosphate and sodium chloride.

16. The intranasal immunogenic composition of any claim 1, wherein the non-ionic detergent is selected from the group consisting of polysorbate-20 (PS20), polysorbate-40 (PS40), polysorbate-60 (PS60), polysorbate-65 (PS65), and polysorbate-80 (PS80).

17. The intranasal immunogenic composition of claim 1, comprising a saponin-based adjuvant comprising:
(i) a first iscom particle comprising fraction A of Quillaja Saponaria Molina and not fraction C of Quillaja Saponaria Molina; and
(ii) a second iscom particle comprising fraction C of Quillaja Saponaria Molina and not fraction A of Quillaja Saponaria Molina.

18. A dry powder composition comprising a dried intranasal immunogenic composition of claim 1.

19. An aerosol comprising the intranasal immunogenic composition of claim 1.

20. A method of stimulating an immune response against SARS-COV-2, influenza, RSV, or a combination thereof in a patient, comprising intranasally administering the intranasal immunogenic composition of claim 1 to the patient.

The application's sequence listing, which the Patent Office published only in electronic form, follows.

SEQUENCE LISTING (363 sequences)

SEQ ID NO: 1 - protein, 1273 aa, Severe acute respiratory syndrome-related coronavirus
MFVFLVLLPLVSSQCVNLTTRTQLPPAYTNSFTRGVYYPDKVFRSSVLHSTQDLFLPFFSNVTWFHAIHVSGTNGTKRFDNPVLPFNDGVYFASTEKSNIIRGWIFGTTLDSKTQSLLIVNNATNVVIKVCEFQFCNDPFLGVYYHKNNKSWMESEFRVYSSANNCTFEYVSQPFLMDLEGKQGNFKNLREFVFKNIDGYFKIYSKHTPINLVRDLPQGFSALEPLVDLPIGINITRFQTLLALHRSYLTPGDSSSGWTAGAAAYYVGYLQPRTFLLKYNENGTITDAVDCALDPLSETKCTLKSFTVEKGIYQTSNFRVQPTESIVRFPNITNLCPFGEVFNATRFASVYAWNRKRISNCVADYSVLYNSASFSTFKCYGVSPTKLNDLCFTNVYADSFVIRGDEVRQIAPGQTGKIADYNYKLPDDFTGCVIAWNSNNLDSKVGGNYNYLYRLFRKSNLKPFERDISTEIYQAGSTPCNGVEGFNCYFPLQSYGFQPTNGVGYQPYRVVVLSFELLHAPATVCGPKKSTNLVKNKCVNFNFNGLTGTGVLTESNKKFLPFQQFGRDIADTTDAVRDPQTLEILDITPCSFGGVSVITPGTNTSNQVAVLYQDVNCTEVPVAIHADQLTPTWRVYSTGSNVFQTRAGCLIGAEHVNNSYECDIPIGAGICASYQTQTNSPRRARSVASQSIIAYTMSLGAENSVAYSNNSIAIPTNFTISVTTEILPVSMTKTSVDCTMYICGDSTECSNLLLQYGSFCTQLNRALTGIAVEQDKNTQEVFAQVKQIYKTPPIKDFGGFNFSQILPDPSKPSKRSFIEDLLFNKVTLADAGFIKQYGDCLGDIAARDLICAQKFNGLTVLPPLLTDEMIAQYTSALLAGTITSGWTFGAGAALQIPFAMQMAYRFNGIGVTQNVLYENQKLIANQFNSAIGKIQDSLSSTASALGKLQDVVNQNAQALNTLVKQLSSNFGAISSVLNDILSRLDKVEAEVQIDRLITGRLQSLQTYVTQQLIRAAEIRASANLAATKMSECVLGQSKRVDFCGKGYHLMSFPQSAPHGVVFLHVTYVPAQEKNFTTAPAICHDGKAHFPREGVFVSNGTHWFVTQRNFYEPQIITTDNTFVSGNCDVVIGIVNNTVYDPLQPELDSFKEELDKYFKNHTSPDVDLGDISGINASVVNIQKEIDRLNEVAKNLNESLIDLQELGKYEQYIKWPWYIWLGFIAGLIAIVMVTIMLCCMTSCCSCLKGCCSCGSCCKFDEDDSEPVLKGVKLHYT

SEQ ID NO: 2 - protein, 1260 aa, Severe acute respiratory syndrome-related coronavirus
QCVNLTTRTQLPPAYTNSFTRGVYYPDKVFRSSVLHSTQDLFLPFFSNVTWFHAIHVSGTNGTKRFDNPVLPFNDGVYFASTEKSNIIRGWIFGTTLDSKTQSLLIVNNATNVVIKVCEFQFCNDPFLGVYYHKNNKSWMESEFRVYSSANNCTFEYVSQPFLMDLEGKQGNFKNLREFVFKNIDGYFKIYSKHTPINLVRDLPQGFSALEPLVDLPIGINITRFQTLLALHRSYLTPGDSSSGWTAGAAAYYVGYLQPRTFLLKYNENGTITDAVDCALDPLSETKCTLKSFTVEKGIYQTSNFRVQPTESIVRFPNITNLCPFGEVFNATRFASVYAWNRKRISNCVADYSVLYNSASFSTFKCYGVSPTKLNDLCFTNVYADSFVIRGDEVRQIAPGQTGKIADYNYKLPDDFTGCVIAWNSNNLDSKVGGNYNYLYRLFRKSNLKPFERDISTEIYQAGSTPCNGVEGFNCYFPLQSYGFQPTNGVGYQPYRVVVLSFELLHAPATVCGPKKSTNLVKNKCVNFNFNGLTGTGVLTESNKKFLPFQQFGRDIADTTDAVRDPQTLEILDITPCSFGGVSVITPGTNTSNQVAVLYQDVNCTEVPVAIHADQLTPTWRVYSTGSNVFQTRAGCLIGAEHVNNSYECDIPIGAGICASYQTQTNSPRRARSVASQSIIAYTMSLGAENSVAYSNNSIAIPTNFTISVTTEILPVSMTKTSVDCTMYICGDSTECSNLLLQYGSFCTQLNRALTGIAVEQDKNTQEVFAQVKQIYKTPPIKDFGGFNFSQILPDPSKPSKRSFIEDLLFNKVTLADAGFIKQYGDCLGDIAARDLICAQKFNGLTVLPPLLTDEMIAQYTSALLAGTITSGWTFGAGAALQIPFAMQMAYRFNGIGVTQNVLYENQKLIANQFNSAIGKIQDSLSSTASALGKLQDVVNQNAQALNTLVKQLSSNFGAISSVLNDILSRLDKVEAEVQIDRLITGRLQSLQTYVTQQLIRAAEIRASANLAATKMSECVLGQSKRVDFCGKGYHLMSFPQSAPHGVVFLHVTYVPAQEKNFTTAPAICHDGKAHFPREGVFVSNGTHWFVTQRNFYEPQIITTDNTFVSGNCDVVIGIVNNTVYDPLQPELDSFKEELDKYFKNHTSPDVDLGDISGINASVVNIQKEIDRLNEVAKNLNESLIDLQELGKYEQYIKWPWYIWLGFIAGLIAIVMVTIMLCCMTSCCSCLKGCCSCGSCCKFDEDDSEPVLKGVKLHYT

SEQ ID NO: 3 - protein, 1273 aa, synthetic construct
  REGION 1..1273: note = RECOMBINANT S PROTEIN
MFVFLVLLPLVSSQCVNLTTRTQLPPAYTNSFTRGVYYPDKVFRSSVLHSTQDLFLPFFSNVTWFHAIHVSGTNGTKRFDNPVLPFNDGVYFASTEKSNIIRGWIFGTTLDSKTQSLLIVNNATNVVIKVCEFQFCNDPFLGVYYHKNNKSWMESEFRVYSSANNCTFEYVSQPFLMDLEGKQGNFKNLREFVFKNIDGYFKIYSKHTPINLVRDLPQGFSALEPLVDLPIGINITRFQTLLALHRSYLTPGDSSSGWTAGAAAYYVGYLQPRTFLLKYNENGTITDAVDCALDPLSETKCTLKSFTVEKGIYQTSNFRVQPTESIVRFPNITNLCPFGEVFNATRFASVYAWNRKRISNCVADYSVLYNSASFSTFKCYGVSPTKLNDLCFTNVYADSFVIRGDEVRQIAPGQTGKIADYNYKLPDDFTGCVIAWNSNNLDSKVGGNYNYLYRLFRKSNLKPFERDISTEIYQAGSTPCNGVEGFNCYFPLQSYGFQPTNGVGYQPYRVVVLSFELLHAPATVCGPKKSTNLVKNKCVNFNFNGLTGTGVLTESNKKFLPFQQFGRDIADTTDAVRDPQTLEILDITPCSFGGVSVITPGTNTSNQVAVLYQDVNCTEVPVAIHADQLTPTWRVYSTGSNVFQTRAGCLIGAEHVNNSYECDIPIGAGICASYQTQTNSPQQAQSVASQSIIAYTMSLGAENSVAYSNNSIAIPTNFTISVTTEILPVSMTKTSVDCTMYICGDSTECSNLLLQYGSFCTQLNRALTGIAVEQDKNTQEVFAQVKQIYKTPPIKDFGGFNFSQILPDPSKPSKRSFIEDLLFNKVTLADAGFIKQYGDCLGDIAARDLICAQKFNGLTVLPPLLTDEMIAQYTSALLAGTITSGWTFGAGAALQIPFAMQMAYRFNGIGVTQNVLYENQKLIANQFNSAIGKIQDSLSSTASALGKLQDVVNQNAQALNTLVKQLSSNFGAISSVLNDILSRLDKVEAEVQIDRLITGRLQSLQTYVTQQLIRAAEIRASANLAATKMSECVLGQSKRVDFCGKGYHLMSFPQSAPHGVVFLHVTYVPAQEKNFTTAPAICHDGKAHFPREGVFVSNGTHWFVTQRNFYEPQIITTDNTFVSGNCDVVIGIVNNTVYDPLQPELDSFKEELDKYFKNHTSPDVDLGDISGINASVVNIQKEIDRLNEVAKNLNESLIDLQELGKYEQYIKWPWYIWLGFIAGLIAIVMVTIMLCCMTSCCSCLKGCCSCGSCCKFDEDDSEPVLKGVKLHYT

SEQ ID NO: 4 - protein, 1260 aa, synthetic construct
  REGION 1..1260: note = RECOMBINANT S PROTEIN
QCVNLTTRTQLPPAYTNSFTRGVYYPDKVFRSSVLHSTQDLFLPFFSNVTWFHAIHVSGTNGTKRFDNPVLPFNDGVYFASTEKSNIIRGWIFGTTLDSKTQSLLIVNNATNVVIKVCEFQFCNDPFLGVYYHKNNKSWMESEFRVYSSANNCTFEYVSQPFLMDLEGKQGNFKNLREFVFKNIDGYFKIYSKHTPINLVRDLPQGFSALEPLVDLPIGINITRFQTLLALHRSYLTPGDSSSGWTAGAAAYYVGYLQPRTFLLKYNENGTITDAVDCALDPLSETKCTLKSFTVEKGIYQTSNFRVQPTESIVRFPNITNLCPFGEVFNATRFASVYAWNRKRISNCVADYSVLYNSASFSTFKCYGVSPTKLNDLCFTNVYADSFVIRGDEVRQIAPGQTGKIADYNYKLPDDFTGCVIAWNSNNLDSKVGGNYNYLYRLFRKSNLKPFERDISTEIYQAGSTPCNGVEGFNCYFPLQSYGFQPTNGVGYQPYRVVVLSFELLHAPATVCGPKKSTNLVKNKCVNFNFNGLTGTGVLTESNKKFLPFQQFGRDIADTTDAVRDPQTLEILDITPCSFGGVSVITPGTNTSNQVAVLYQDVNCTEVPVAIHADQLTPTWRVYSTGSNVFQTRAGCLIGAEHVNNSYECDIPIGAGICASYQTQTNSPQQAQSVASQSIIAYTMSLGAENSVAYSNNSIAIPTNFTISVTTEILPVSMTKTSVDCTMYICGDSTECSNLLLQYGSFCTQLNRALTGIAVEQDKNTQEVFAQVKQIYKTPPIKDFGGFNFSQILPDPSKPSKRSFIEDLLFNKVTLADAGFIKQYGDCLGDIAARDLICAQKFNGLTVLPPLLTDEMIAQYTSALLAGTITSGWTFGAGAALQIPFAMQMAYRFNGIGVTQNVLYENQKLIANQFNSAIGKIQDSLSSTASALGKLQDVVNQNAQALNTLVKQLSSNFGAISSVLNDILSRLDKVEAEVQIDRLITGRLQSLQTYVTQQLIRAAEIRASANLAATKMSECVLGQSKRVDFCGKGYHLMSFPQSAPHGVVFLHVTYVPAQEKNFTTAPAICHDGKAHFPREGVFVSNGTHWFVTQRNFYEPQIITTDNTFVSGNCDVVIGIVNNTVYDPLQPELDSFKEELDKYFKNHTSPDVDLGDISGINASVVNIQKEIDRLNEVAKNLNESLIDLQELGKYEQYIKWPWYIWLGFIAGLIAIVMVTIMLCCMTSCCSCLKGCCSCGSCCKFDEDDSEPVLKGVKLHYT

SEQ ID NO: 5 - protein, 13 aa, synthetic construct
  REGION 1..13: note = SIGNAL PEPTIDE
MFVFLVLLPLVSS

SEQ ID NO: 6 - protein, 4 aa, synthetic construct
  REGION 1..4: note = RECOMBINANT FURIN CLEAVAGE SITE
RRAR

SEQ ID NO: 7 - protein, 4 aa, synthetic construct
  REGION 1..4: note = RECOMBINANT FURIN CLEAVAGE SITE
QQAQ

SEQ ID NO: 8 - protein, 4 aa, synthetic construct
  REGION 1..4: note = RECOMBINANT FURIN CLEAVAGE SITE
QRAR

SEQ ID NO: 9 - protein, 4 aa, synthetic construct
  REGION 1..4: note = RECOMBINANT FURIN CLEAVAGE SITE
RQAR

SEQ ID NO: 10 - protein, 4 aa, synthetic construct
  REGION 1..4: note = RECOMBINANT FURIN CLEAVAGE SITE
RRAQ

SEQ ID NO: 11 - protein, 4 aa, synthetic construct
  REGION 1..4: note = RECOMBINANT FURIN CLEAVAGE SITE
QQAR

SEQ ID NO: 12 - protein, 4 aa, synthetic construct
  REGION 1..4: note = RECOMBINANT FURIN CLEAVAGE SITE
RQAQ

SEQ ID NO: 13 - protein, 4 aa, synthetic construct
  REGION 1..4: note = RECOMBINANT FURIN CLEAVAGE SITE
QRAQ

SEQ ID NO: 14 - protein, 4 aa, synthetic construct
  REGION 1..4: note = RECOMBINANT FURIN CLEAVAGE SITE
NNAN

SEQ ID NO: 15 - protein, 4 aa, synthetic construct
  REGION 1..4: note = RECOMBINANT FURIN CLEAVAGE SITE
NRAR

SEQ ID NO: 16 - protein, 4 aa, synthetic construct
  REGION 1..4: note = RECOMBINANT FURIN CLEAVAGE SITE
RNAR

SEQ ID NO: 17 - protein, 4 aa, synthetic construct
  REGION 1..4: note = RECOMBINANT FURIN CLEAVAGE SITE
RRAN

SEQ ID NO: 18 - protein, 4 aa, synthetic construct
  REGION 1..4: note = RECOMBINANT FURIN CLEAVAGE SITE
NNAR

SEQ ID NO: 19 - protein, 4 aa, synthetic construct
  REGION 1..4: note = RECOMBINANT FURIN CLEAVAGE SITE
RNAN

SEQ ID NO: 20 - protein, 4 aa, synthetic construct
  REGION 1..4: note = RECOMBINANT FURIN CLEAVAGE SITE
NRAN

SEQ ID NO: 21 - protein, 4 aa, synthetic construct
  REGION 1..4: note = RECOMBINANT FURIN CLEAVAGE SITE
AAAA

SEQ ID NO: 22 - protein, 4 aa, synthetic construct
  REGION 1..4: note = RECOMBINANT FURIN CLEAVAGE SITE
ARAR

SEQ ID NO: 23 - protein, 4 aa, synthetic construct
  REGION 1..4: note = RECOMBINANT FURIN CLEAVAGE SITE
RAAR

SEQ ID NO: 24 - protein, 4 aa, synthetic construct
  REGION 1..4: note = RECOMBINANT FURIN CLEAVAGE SITE
RRAA

SEQ ID NO: 25 - protein, 4 aa, synthetic construct
  REGION 1..4: note = RECOMBINANT FURIN CLEAVAGE SITE
AAAR

SEQ ID NO: 26 - protein, 4 aa, synthetic construct
  REGION 1..4: note = RECOMBINANT FURIN CLEAVAGE SITE
RAAA

SEQ ID NO: 27 - protein, 4 aa, synthetic construct
  REGION 1..4: note = RECOMBINANT FURIN CLEAVAGE SITE
ARAA

SEQ ID NO: 28 - protein, 4 aa, synthetic construct
  REGION 1..4: note = RECOMBINANT FURIN CLEAVAGE SITE
GGAG

SEQ ID NO: 29 - protein, 4 aa, synthetic construct
  REGION 1..4: note = RECOMBINANT FURIN CLEAVAGE SITE
GRAR

SEQ ID NO: 30 - protein, 4 aa, synthetic construct
  REGION 1..4: note = RECOMBINANT FURIN CLEAVAGE SITE
RGAR

SEQ ID NO: 31 - protein, 4 aa, synthetic construct
  REGION 1..4: note = RECOMBINANT FURIN CLEAVAGE SITE
RRAG

SEQ ID NO: 32 - protein, 4 aa, synthetic construct
  REGION 1..4: note = RECOMBINANT FURIN CLEAVAGE SITE
GGAR

SEQ ID NO: 33 - protein, 4 aa, synthetic construct
  REGION 1..4: note = RECOMBINANT FURIN CLEAVAGE SITE
RGAG

SEQ ID NO: 34 - protein, 4 aa, synthetic construct
  REGION 1..4: note = RECOMBINANT FURIN CLEAVAGE SITE
GRAG

SEQ ID NO: 35 - DNA, 3819 bp, synthetic construct
  misc_feature 1..3819: note = RECOMBINANT SPIKE PROTEIN
  source 1..3819: mol_type = other DNA
atgttcgtcttcctggtgctgctgcccctggtgtccagccagtgcgtgaacctgaccactaggactcagctgcctcccgcttacaccaactcattcactcgcggtgtgtactaccctgacaaggtcttccgttcttcagtgctgcactcaactcaggacctgttcctgcccttcttctccaacgtcacctggttccacgccatccacgtgtccggcaccaacggcactaagcgcttcgacaacccagtgctgcctttcaacgacggtgtctacttcgcttcaaccgagaagtccaacatcatccgtggatggatcttcggcaccactctggacagcaagactcagtctctgctgatcgtcaacaacgccaccaacgtggtcatcaaggtctgcgaattccagttctgcaacgacccattcctgggcgtctactaccacaagaacaacaagtcatggatggagtccgaattccgcgtctactccagcgctaacaactgcactttcgagtacgtgtcccagcctttcctgatggacctggaaggaaagcagggtaacttcaagaacctgagggagttcgtgttcaagaacatcgacggatacttcaagatttacagcaagcacaccccaatcaacctggtgcgcgacctgcctcagggtttctctgctctggagccactggtggacctgcctatcggcatcaacatcacccgcttccagactctgctggctctgcaccgttcctacctgactccaggcgactcatcttctggatggactgctggagctgctgcttactacgtgggctacctgcagcctcgcaccttcctgctgaagtacaacgaaaacggaaccatcactgacgccgtcgactgcgctctggaccctctgtcagaaaccaagtgcactctgaagtccttcaccgtggagaagggcatctaccagacttcaaacttcagggtgcagcccaccgaatccatcgtcagattccctaacatcactaacctgtgccccttcggagaggtcttcaacgccacccgcttcgcttccgtgtacgcctggaacaggaagagaatctcaaactgcgtcgctgactactccgtgctgtacaactcagcctccttcagcaccttcaagtgctacggcgtgtcaccaactaagctgaacgacctgtgcttcaccaacgtctacgccgactccttcgtgatcaggggagacgaggtcagacagatcgctcctggccagactggaaagatcgccgactacaactacaagctgcccgacgacttcaccggttgcgtcatcgcttggaacagcaacaacctggactctaaagtgggtggcaactacaactacctgtaccgcctgttccgtaagtcaaacctgaagccattcgagagggacatcagcactgaaatctaccaggccggatctaccccttgcaacggtgtcgagggcttcaactgctacttccccctgcagtcctacggtttccagccaactaacggtgtgggctaccagccttacagagtggtcgtgctgagcttcgaactgctccacgctcctgctactgtgtgcggtccaaagaagtctaccaacctggtcaagaacaagtgcgtgaacttcaacttcaacggcctgaccggaactggtgtcctgaccgagagcaacaagaagttcctgcccttccagcagttcggaagggacatcgctgacaccactgacgctgtgcgcgaccctcagaccctggaaatcctggacatcactccatgctcattcggaggtgtctccgtgatcacccctggcaccaacacttctaaccaggtcgctgtgctgtaccaggacgtcaactgcaccgaggtccctgtggccatccacgctgaccagctgacccccacttggcgcgtgtactccaccggcagcaacgtgttccagactcgtgctggttgcctgatcggcgccgagcacgtgaacaacagctacgaatgcgacatccccatcggcgctggaatctgcgcctcttaccagacccagactaacagcccacgcagggctcgctctgtggcctctcagtcaatcatcgcttacaccatgtcactgggcgctgaaaactccgtggcctactctaacaactcaatcgccatccccaccaacttcactatcagcgtgaccactgagatcctgccagtcagcatgaccaagacttctgtggactgcactatgtacatctgcggagacagcaccgaatgctctaacctgctgctgcagtacggctctttctgcacccagctgaaccgtgctctgactggaatcgccgtggagcaggacaagaacactcaggaagtcttcgctcaggtgaagcaaatctacaagaccccacctatcaaggacttcggcggattcaacttctcccagatcctgcctgacccctccaagccaagcaagcgctctttcatcgaggacctgctgttcaacaaggtcactctggccgacgctggattcatcaagcagtacggagactgcctgggtgacatcgccgctcgtgacctgatctgcgctcagaagttcaacggtctgaccgtgctgcccccactgctgactgacgaaatgatcgcccagtacactagcgccctgctggctggaaccatcacttctggttggaccttcggtgctggcgccgctctgcagatccctttcgctatgcagatggcctaccgtttcaacggaatcggtgtcacccagaacgtgctgtacgagaaccagaagctgatcgctaaccagttcaactcagccatcggaaagatccaggacagcctgagctctactgcctctgctctgggcaagctgcaggacgtcgtgaaccagaacgcccaggctctgaacaccctggtcaagcagctgtcatccaacttcggtgctatcagctctgtgctgaacgacatcctgtcccgcctggacaaggtcgaggccgaagtgcagatcgaccgcctgatcactggccgtctgcagtcactgcagacctacgtgactcagcagctgatcagggccgctgaaatcagagcctccgctaacctggccgctaccaagatgagcgagtgcgtcctgggtcaatctaagcgtgtggacttctgcggcaagggataccacctgatgtcattccctcagtctgctccccacggtgtggtgttcctgcacgtcacctacgtgccagcccaggagaagaacttcaccactgcccctgctatctgccacgacggcaaggctcacttccccagggaaggtgtcttcgtgagcaacggcacccactggttcgtcactcagagaaacttctacgagccacagatcatcaccactgacaacactttcgtgtctggaaactgcgacgtggtcatcggtatcgtcaacaacaccgtgtacgaccccctgcagccagagctggactcattcaaggaggaactggacaagtacttcaagaaccacacctcccctgacgtcgacctgggcgacatctcaggaatcaacgcttccgtcgtgaacatccagaaggagatcgaccgcctgaacgaagtggccaagaacctgaacgaaagcctgatcgacctgcaggagctgggcaagtacgaacagtacatcaagtggccttggtacatctggctgggtttcatcgctggcctcatcgctatcgtgatggtgaccatcatgctgtgctgcatgacttcatgctgctcctgcctgaagggctgctgcagctgcggatcttgctgcaagttcgacgaggacgactctgaacccgtcctgaagggcgtgaagctgcactacacc

SEQ ID NO: 36 - protein, 1279 aa, synthetic construct
  REGION 1..1279: note = RECOMBINANT SPIKE PROTEIN
MFVFLVLLPLVSSQCVNLTTRTQLPPAYTNSFTRGVYYPDKVFRSSVLHSTQDLFLPFFSNVTWFHAIHVSGTNGTKRFDNPVLPFNDGVYFASTEKSNIIRGWIFGTTLDSKTQSLLIVNNATNVVIKVCEFQFCNDPFLGVYYHKNNKSWMESEFRVYSSANNCTFEYVSQPFLMDLEGKQGNFKNLREFVFKNIDGYFKIYSKHTPINLVRDLPQGFSALEPLVDLPIGINITRFQTLLALHRSYLTPGDSSSGWTAGAAAYYVGYLQPRTFLLKYNENGTITDAVDCALDPLSETKCTLKSFTVEKGIYQTSNFRVQPTESIVRFPNITNLCPFGEVFNATRFASVYAWNRKRISNCVADYSVLYNSASFSTFKCYGVSPTKLNDLCFTNVYADSFVIRGDEVRQIAPGQTGKIADYNYKLPDDFTGCVIAWNSNNLDSKVGGNYNYLYRLFRKSNLKPFERDISTEIYQAGSTPCNGVEGFNCYFPLQSYGFQPTNGVGYQPYRVVVLSFELLHAPATVCGPKKSTNLVKNKCVNFNFNGLTGTGVLTESNKKFLPFQQFGRDIADTTDAVRDPQTLEILDITPCSFGGVSVITPGTNTSNQVAVLYQDVNCTEVPVAIHADQLTPTWRVYSTGSNVFQTRAGCLIGAEHVNNSYECDIPIGAGICASYQTQTNSPRRARSVASQSIIAYTMSLGAENSVAYSNNSIAIPTNFTISVTTEILPVSMTKTSVDCTMYICGDSTECSNLLLQYGSFCTQLNRALTGIAVEQDKNTQEVFAQVKQIYKTPPIKDFGGFNFSQILPDPSKPSKRSFIEDLLFNKVTLADAGFIKQYGDCLGDIAARDLICAQKFNGLTVLPPLLTDEMIAQYTSALLAGTITSGWTFGAGAALQIPFAMQMAYRFNGIGVTQNVLYENQKLIANQFNSAIGKIQDSLSSTASALGKLQDVVNQNAQALNTLVKQLSSNFGAISSVLNDILSRLDKVEAEVQIDRLITGRLQSLQTYVTQQLIRAAEIRASANLAATKMSECVLGQSKRVDFCGKGYHLMSFPQSAPHGVVFLHVTYVPAQEKNFTTAPAICHDGKAHFPREGVFVSNGTHWFVTQRNFYEPQIITTDNTFVSGNCDVVIGIVNNTVYDPLQPELDSFKEELDKYFKNHTSPDVDLGDISGINASVVNIQKEIDRLNEVAKNLNESLIDLQELGKYEQYIKWPWYIWLGFIAGLIAIVMVTIMLCCMTSCCSCLKGCCSCGSCCKFDEDDSEPVLKGVKLHYTHHHHHH

SEQ ID NO: 37 - DNA, 3837 bp, synthetic construct
  misc_feature 1..3837: note = RECOMBINANT SPIKE PROTEIN
  source 1..3837: mol_type = other DNA
atgttcgtcttcctggtgctgctgcccctggtgtccagccagtgcgtgaacctgaccactaggactcagctgcctcccgcttacaccaactcattcactcgcggtgtgtactaccctgacaaggtcttccgttcttcagtgctgcactcaactcaggacctgttcctgcccttcttctccaacgtcacctggttccacgccatccacgtgtccggcaccaacggcactaagcgcttcgacaacccagtgctgcctttcaacgacggtgtctacttcgcttcaaccgagaagtccaacatcatccgtggatggatcttcggcaccactctggacagcaagactcagtctctgctgatcgtcaacaacgccaccaacgtggtcatcaaggtctgcgaattccagttctgcaacgacccattcctgggcgtctactaccacaagaacaacaagtcatggatggagtccgaattccgcgtctactccagcgctaacaactgcactttcgagtacgtgtcccagcctttcctgatggacctggaaggaaagcagggtaacttcaagaacctgagggagttcgtgttcaagaacatcgacggatacttcaagatttacagcaagcacaccccaatcaacctggtgcgcgacctgcctcagggtttctctgctctggagccactggtggacctgcctatcggcatcaacatcacccgcttccagactctgctggctctgcaccgttcctacctgactccaggcgactcatcttctggatggactgctggagctgctgcttactacgtgggctacctgcagcctcgcaccttcctgctgaagtacaacgaaaacggaaccatcactgacgccgtcgactgcgctctggaccctctgtcagaaaccaagtgcactctgaagtccttcaccgtggagaagggcatctaccagacttcaaacttcagggtgcagcccaccgaatccatcgtcagattccctaacatcactaacctgtgccccttcggagaggtcttcaacgccacccgcttcgcttccgtgtacgcctggaacaggaagagaatctcaaactgcgtcgctgactactccgtgctgtacaactcagcctccttcagcaccttcaagtgctacggcgtgtcaccaactaagctgaacgacctgtgcttcaccaacgtctacgccgactccttcgtgatcaggggagacgaggtcagacagatcgctcctggccagactggaaagatcgccgactacaactacaagctgcccgacgacttcaccggttgcgtcatcgcttggaacagcaacaacctggactctaaagtgggtggcaactacaactacctgtaccgcctgttccgtaagtcaaacctgaagccattcgagagggacatcagcactgaaatctaccaggccggatctaccccttgcaacggtgtcgagggcttcaactgctacttccccctgcagtcctacggtttccagccaactaacggtgtgggctaccagccttacagagtggtcgtgctgagcttcgaactgctccacgctcctgctactgtgtgcggtccaaagaagtctaccaacctggtcaagaacaagtgcgtgaacttcaacttcaacggcctgaccggaactggtgtcctgaccgagagcaacaagaagttcctgcccttccagcagttcggaagggacatcgctgacaccactgacgctgtgcgcgaccctcagaccctggaaatcctggacatcactccatgctcattcggaggtgtctccgtgatcacccctggcaccaacacttctaaccaggtcgctgtgctgtaccaggacgtcaactgcaccgaggtccctgtggccatccacgctgaccagctgacccccacttggcgcgtgtactccaccggcagcaacgtgttccagactcgtgctggttgcctgatcggcgccgagcacgtgaacaacagctacgaatgcgacatccccatcggcgctggaatctgcgcctcttaccagacccagactaacagcccacgcagggctcgctctgtggcctctcagtcaatcatcgcttacaccatgtcactgggcgctgaaaactccgtggcctactctaacaactcaatcgccatccccaccaacttcactatcagcgtgaccactgagatcctgccagtcagcatgaccaagacttctgtggactgcactatgtacatctgcggagacagcaccgaatgctctaacctgctgctgcagtacggctctttctgcacccagctgaaccgtgctctgactggaatcgccgtggagcaggacaagaacactcaggaagtcttcgctcaggtgaagcaaatctacaagaccccacctatcaaggacttcggcggattcaacttctcccagatcctgcctgacccctccaagccaagcaagcgctctttcatcgaggacctgctgttcaacaaggtcactctggccgacgctggattcatcaagcagtacggagactgcctgggtgacatcgccgctcgtgacctgatctgcgctcagaagttcaacggtctgaccgtgctgcccccactgctgactgacgaaatgatcgcccagtacactagcgccctgctggctggaaccatcacttctggttggaccttcggtgctggcgccgctctgcagatccctttcgctatgcagatggcctaccgtttcaacggaatcggtgtcacccagaacgtgctgtacgagaaccagaagctgatcgctaaccagttcaactcagccatcggaaagatccaggacagcctgagctctactgcctctgctctgggcaagctgcaggacgtcgtgaaccagaacgcccaggctctgaacaccctggtcaagcagctgtcatccaacttcggtgctatcagctctgtgctgaacgacatcctgtcccgcctggacaaggtcgaggccgaagtgcagatcgaccgcctgatcactggccgtctgcagtcactgcagacctacgtgactcagcagctgatcagggccgctgaaatcagagcctccgctaacctggccgctaccaagatgagcgagtgcgtcctgggtcaatctaagcgtgtggacttctgcggcaagggataccacctgatgtcattccctcagtctgctccccacggtgtggtgttcctgcacgtcacctacgtgccagcccaggagaagaacttcaccactgcccctgctatctgccacgacggcaaggctcacttccccagggaaggtgtcttcgtgagcaacggcacccactggttcgtcactcagagaaacttctacgagccacagatcatcaccactgacaacactttcgtgtctggaaactgcgacgtggtcatcggtatcgtcaacaacaccgtgtacgaccccctgcagccagagctggactcattcaaggaggaactggacaagtacttcaagaaccacacctcccctgacgtcgacctgggcgacatctcaggaatcaacgcttccgtcgtgaacatccagaaggagatcgaccgcctgaacgaagtggccaagaacctgaacgaaagcctgatcgacctgcaggagctgggcaagtacgaacagtacatcaagtggccttggtacatctggctgggtttcatcgctggcctcatcgctatcgtgatggtgaccatcatgctgtgctgcatgacttcatgctgctcctgcctgaagggctgctgcagctgcggatcttgctgcaagttcgacgaggacgactctgaacccgtcctgaagggcgtgaagctgcactacacccaccaccaccaccaccac

SEQ ID NO: 38 - protein, 1266 aa, synthetic construct
  REGION 1..1266: note = RECOMBINANT SPIKE PROTEIN
QCVNLTTRTQLPPAYTNSFTRGVYYPDKVFRSSVLHSTQDLFLPFFSNVTWFHAIHVSGTNGTKRFDNPVLPFNDGVYFASTEKSNIIRGWIFGTTLDSKTQSLLIVNNATNVVIKVCEFQFCNDPFLGVYYHKNNKSWMESEFRVYSSANNCTFEYVSQPFLMDLEGKQGNFKNLREFVFKNIDGYFKIYSKHTPINLVRDLPQGFSALEPLVDLPIGINITRFQTLLALHRSYLTPGDSSSGWTAGAAAYYVGYLQPRTFLLKYNENGTITDAVDCALDPLSETKCTLKSFTVEKGIYQTSNFRVQPTESIVRFPNITNLCPFGEVFNATRFASVYAWNRKRISNCVADYSVLYNSASFSTFKCYGVSPTKLNDLCFTNVYADSFVIRGDEVRQIAPGQTGKIADYNYKLPDDFTGCVIAWNSNNLDSKVGGNYNYLYRLFRKSNLKPFERDISTEIYQAGSTPCNGVEGFNCYFPLQSYGFQPTNGVGYQPYRVVVLSFELLHAPATVCGPKKSTNLVKNKCVNFNFNGLTGTGVLTESNKKFLPFQQFGRDIADTTDAVRDPQTLEILDITPCSFGGVSVITPGTNTSNQVAVLYQDVNCTEVPVAIHADQLTPTWRVYSTGSNVFQTRAGCLIGAEHVNNSYECDIPIGAGICASYQTQTNSPRRARSVASQSIIAYTMSLGAENSVAYSNNSIAIPTNFTISVTTEILPVSMTKTSVDCTMYICGDSTECSNLLLQYGSFCTQLNRALTGIAVEQDKNTQEVFAQVKQIYKTPPIKDFGGFNFSQILPDPSKPSKRSFIEDLLFNKVTLADAGFIKQYGDCLGDIAARDLICAQKFNGLTVLPPLLTDEMIAQYTSALLAGTITSGWTFGAGAALQIPFAMQMAYRFNGIGVTQNVLYENQKLIANQFNSAIGKIQDSLSSTASALGKLQDVVNQNAQALNTLVKQLSSNFGAISSVLNDILSRLDKVEAEVQIDRLITGRLQSLQTYVTQQLIRAAEIRASANLAATKMSECVLGQSKRVDFCGKGYHLMSFPQSAPHGVVFLHVTYVPAQEKNFTTAPAICHDGKAHFPREGVFVSNGTHWFVTQRNFYEPQIITTDNTFVSGNCDVVIGIVNNTVYDPLQPELDSFKEELDKYFKNHTSPDVDLGDISGINASVVNIQKEIDRLNEVAKNLNESLIDLQELGKYEQYIKWPWYIWLGFIAGLIAIVMVTIMLCCMTSCCSCLKGCCSCGSCCKFDEDDSEPVLKGVKLHYTHHHHHH

SEQ ID NO: 39 - protein, 60 aa, synthetic construct
  REGION 1..60: note = RECOMBINANT SPIKE PROTEIN
WYIWLGFIAGLIAIVMVTIMLCCMTSCCSCLKGCCSCGSCCKFDEDDSEPVLKGVKLHYT

SEQ ID NO: 40 - protein, 1213 aa, synthetic construct
  REGION 1..1213: note = RECOMBINANT SPIKE PROTEIN
MFVFLVLLPLVSSQCVNLTTRTQLPPAYTNSFTRGVYYPDKVFRSSVLHSTQDLFLPFFSNVTWFHAIHVSGTNGTKRFDNPVLPFNDGVYFASTEKSNIIRGWIFGTTLDSKTQSLLIVNNATNVVIKVCEFQFCNDPFLGVYYHKNNKSWMESEFRVYSSANNCTFEYVSQPFLMDLEGKQGNFKNLREFVFKNIDGYFKIYSKHTPINLVRDLPQGFSALEPLVDLPIGINITRFQTLLALHRSYLTPGDSSSGWTAGAAAYYVGYLQPRTFLLKYNENGTITDAVDCALDPLSETKCTLKSFTVEKGIYQTSNFRVQPTESIVRFPNITNLCPFGEVFNATRFASVYAWNRKRISNCVADYSVLYNSASFSTFKCYGVSPTKLNDLCFTNVYADSFVIRGDEVRQIAPGQTGKIADYNYKLPDDFTGCVIAWNSNNLDSKVGGNYNYLYRLFRKSNLKPFERDISTEIYQAGSTPCNGVEGFNCYFPLQSYGFQPTNGVGYQPYRVVVLSFELLHAPATVCGPKKSTNLVKNKCVNFNFNGLTGTGVLTESNKKFLPFQQFGRDIADTTDAVRDPQTLEILDITPCSFGGVSVITPGTNTSNQVAVLYQDVNCTEVPVAIHADQLTPTWRVYSTGSNVFQTRAGCLIGAEHVNNSYECDIPIGAGICASYQTQTNSPRRARSVASQSIIAYTMSLGAENSVAYSNNSIAIPTNFTISVTTEILPVSMTKTSVDCTMYICGDSTECSNLLLQYGSFCTQLNRALTGIAVEQDKNTQEVFAQVKQIYKTPPIKDFGGFNFSQILPDPSKPSKRSFIEDLLFNKVTLADAGFIKQYGDCLGDIAARDLICAQKFNGLTVLPPLLTDEMIAQYTSALLAGTITSGWTFGAGAALQIPFAMQMAYRFNGIGVTQNVLYENQKLIANQFNSAIGKIQDSLSSTASALGKLQDVVNQNAQALNTLVKQLSSNFGAISSVLNDILSRLDKVEAEVQIDRLITGRLQSLQTYVTQQLIRAAEIRASANLAATKMSECVLGQSKRVDFCGKGYHLMSFPQSAPHGVVFLHVTYVPAQEKNFTTAPAICHDGKAHFPREGVFVSNGTHWFVTQRNFYEPQIITTDNTFVSGNCDVVIGIVNNTVYDPLQPELDSFKEELDKYFKNHTSPDVDLGDISGINASVVNIQKEIDRLNEVAKNLNESLIDLQELGKYEQYIKWP

SEQ ID NO: 41 - protein, 1200 aa, synthetic construct
  REGION 1..1200: note = RECOMBINANT SPIKE PROTEIN
QCVNLTTRTQLPPAYTNSFTRGVYYPDKVFRSSVLHSTQDLFLPFFSNVTWFHAIHVSGTNGTKRFDNPVLPFNDGVYFASTEKSNIIRGWIFGTTLDSKTQSLLIVNNATNVVIKVCEFQFCNDPFLGVYYHKNNKSWMESEFRVYSSANNCTFEYVSQPFLMDLEGKQGNFKNLREFVFKNIDGYFKIYSKHTPINLVRDLPQGFSALEPLVDLPIGINITRFQTLLALHRSYLTPGDSSSGWTAGAAAYYVGYLQPRTFLLKYNENGTITDAVDCALDPLSETKCTLKSFTVEKGIYQTSNFRVQPTESIVRFPNITNLCPFGEVFNATRFASVYAWNRKRISNCVADYSVLYNSASFSTFKCYGVSPTKLNDLCFTNVYADSFVIRGDEVRQIAPGQTGKIADYNYKLPDDFTGCVIAWNSNNLDSKVGGNYNYLYRLFRKSNLKPFERDISTEIYQAGSTPCNGVEGFNCYFPLQSYGFQPTNGVGYQPYRVVVLSFELLHAPATVCGPKKSTNLVKNKCVNFNFNGLTGTGVLTESNKKFLPFQQFGRDIADTTDAVRDPQTLEILDITPCSFGGVSVITPGTNTSNQVAVLYQDVNCTEVPVAIHADQLTPTWRVYSTGSNVFQTRAGCLIGAEHVNNSYECDIPIGAGICASYQTQTNSPRRARSVASQSIIAYTMSLGAENSVAYSNNSIAIPTNFTISVTTEILPVSMTKTSVDCTMYICGDSTECSNLLLQYGSFCTQLNRALTGIAVEQDKNTQEVFAQVKQIYKTPPIKDFGGFNFSQILPDPSKPSKRSFIEDLLFNKVTLADAGFIKQYGDCLGDIAARDLICAQKFNGLTVLPPLLTDEMIAQYTSALLAGTITSGWTFGAGAALQIPFAMQMAYRFNGIGVTQNVLYENQKLIANQFNSAIGKIQDSLSSTASALGKLQDVVNQNAQALNTLVKQLSSNFGAISSVLNDILSRLDKVEAEVQIDRLITGRLQSLQTYVTQQLIRAAEIRASANLAATKMSECVLGQSKRVDFCGKGYHLMSFPQSAPHGVVFLHVTYVPAQEKNFTTAPAICHDGKAHFPREGVFVSNGTHWFVTQRNFYEPQIITTDNTFVSGNCDVVIGIVNNTVYDPLQPELDSFKEELDKYFKNHTSPDVDLGDISGINASVVNIQKEIDRLNEVAKNLNESLIDLQELGKYEQYIKWP

SEQ ID NO: 42 - protein, 1219 aa, synthetic construct
  REGION 1..1219: note = RECOMBINANT SPIKE PROTEIN
MFVFLVLLPLVSSQCVNLTTRTQLPPAYTNSFTRGVYYPDKVFRSSVLHSTQDLFLPFFSNVTWFHAIHVSGTNGTKRFDNPVLPFNDGVYFASTEKSNIIRGWIFGTTLDSKTQSLLIVNNATNVVIKVCEFQFCNDPFLGVYYHKNNKSWMESEFRVYSSANNCTFEYVSQPFLMDLEGKQGNFKNLREFVFKNIDGYFKIYSKHTPINLVRDLPQGFSALEPLVDLPIGINITRFQTLLALHRSYLTPGDSSSGWTAGAAAYYVGYLQPRTFLLKYNENGTITDAVDCALDPLSETKCTLKSFTVEKGIYQTSNFRVQPTESIVRFPNITNLCPFGEVFNATRFASVYAWNRKRISNCVADYSVLYNSASFSTFKCYGVSPTKLNDLCFTNVYADSFVIRGDEVRQIAPGQTGKIADYNYKLPDDFTGCVIAWNSNNLDSKVGGNYNYLYRLFRKSNLKPFERDISTEIYQAGSTPCNGVEGFNCYFPLQSYGFQPTNGVGYQPYRVVVLSFELLHAPATVCGPKKSTNLVKNKCVNFNFNGLTGTGVLTESNKKFLPFQQFGRDIADTTDAVRDPQTLEILDITPCSFGGVSVITPGTNTSNQVAVLYQDVNCTEVPVAIHADQLTPTWRVYSTGSNVFQTRAGCLIGAEHVNNSYECDIPIGAGICASYQTQTNSPRRARSVASQSIIAYTMSLGAENSVAYSNNSIAIPTNFTISVTTEILPVSMTKTSVDCTMYICGDSTECSNLLLQYGSFCTQLNRALTGIAVEQDKNTQEVFAQVKQIYKTPPIKDFGGFNFSQILPDPSKPSKRSFIEDLLFNKVTLADAGFIKQYGDCLGDIAARDLICAQKFNGLTVLPPLLTDEMIAQYTSALLAGTITSGWTFGAGAALQIPFAMQMAYRFNGIGVTQNVLYENQKLIANQFNSAIGKIQDSLSSTASALGKLQDVVNQNAQALNTLVKQLSSNFGAISSVLNDILSRLDKVEAEVQIDRLITGRLQSLQTYVTQQLIRAAEIRASANLAATKMSECVLGQSKRVDFCGKGYHLMSFPQSAPHGVVFLHVTYVPAQEKNFTTAPAICHDGKAHFPREGVFVSNGTHWFVTQRNFYEPQIITTDNTFVSGNCDVVIGIVNNTVYDPLQPELDSFKEELDKYFKNHTSPDVDLGDISGINASVVNIQKEIDRLNEVAKNLNESLIDLQELGKYEQYIKWPHHHHHH

SEQ ID NO: 43 - DNA, 3657 bp, synthetic construct
  misc_feature 1..3657: note = RECOMBINANT SPIKE PROTEIN
  source 1..3657: mol_type = other DNA
atgttcgtcttcctggtgctgctgcccctggtgtccagccagtgcgtgaacctgaccactaggactcagctgcctcccgcttacaccaactcattcactcgcggtgtgtactaccctgacaaggtcttccgttcttcagtgctgcactcaactcaggacctgttcctgcccttcttctccaacgtcacctggttccacgccatccacgtgtccggcaccaacggcactaagcgcttcgacaacccagtgctgcctttcaacgacggtgtctacttcgcttcaaccgagaagtccaacatcatccgtggatggatcttcggcaccactctggacagcaagactcagtctctgctgatcgtcaacaacgccaccaacgtggtcatcaaggtctgcgaattccagttctgcaacgacccattcctgggcgtctactaccacaagaacaacaagtcatggatggagtccgaattccgcgtctactccagcgctaacaactgcactttcgagtacgtgtcccagcctttcctgatggacctggaaggaaagcagggtaacttcaagaacctgagggagttcgtgttcaagaacatcgacggatacttcaagatttacagcaagcacaccccaatcaacctggtgcgcgacctgcctcagggtttctctgctctggagccactggtggacctgcctatcggcatcaacatcacccgcttccagactctgctggctctgcaccgttcctacctgactccaggcgactcatcttctggatggactgctggagctgctgcttactacgtgggctacctgcagcctcgcaccttcctgctgaagtacaacgaaaacggaaccatcactgacgccgtcgactgcgctctggaccctctgtcagaaaccaagtgcactctgaagtccttcaccgtggagaagggcatctaccagacttcaaacttcagggtgcagcccaccgaatccatcgtcagattccctaacatcactaacctgtgccccttcggagaggtcttcaacgccacccgcttcgcttccgtgtacgcctggaacaggaagagaatctcaaactgcgtcgctgactactccgtgctgtacaactcagcctccttcagcaccttcaagtgctacggcgtgtcaccaactaagctgaacgacctgtgcttcaccaacgtctacgccgactccttcgtgatcaggggagacgaggtcagacagatcgctcctggccagactggaaagatcgccgactacaactacaagctgcccgacgacttcaccggttgcgtcatcgcttggaacagcaacaacctggactctaaagtgggtggcaactacaactacctgtaccgcctgttccgtaagtcaaacctgaagccattcgagagggacatcagcactgaaatctaccaggccggatctaccccttgcaacggtgtcgagggcttcaactgctacttccccctgcagtcctacggtttccagccaactaacggtgtgggctaccagccttacagagtggtcgtgctgagcttcgaactgctccacgctcctgctactgtgtgcggtccaaagaagtctaccaacctggtcaagaacaagtgcgtgaacttcaacttcaacggcctgaccggaactggtgtcctgaccgagagcaacaagaagttcctgcccttccagcagttcggaagggacatcgctgacaccactgacgctgtgcgcgaccctcagaccctggaaatcctggacatcactccatgctcattcggaggtgtctccgtgatcacccctggcaccaacacttctaaccaggtcgctgtgctgtaccaggacgtcaactgcaccgaggtccctgtggccatccacgctgaccagctgacccccacttggcgcgtgtactccaccggcagcaacgtgttccagactcgtgctggttgcctgatcggcgccgagcacgtgaacaacagctacgaatgcgacatccccatcggcgctggaatctgcgcctcttaccagacccagactaacagcccacgcagggctcgctctgtggcctctcagtcaatcatcgcttacaccatgtcactgggcgctgaaaactccgtggcctactctaacaactcaatcgccatccccaccaacttcactatcagcgtgaccactgagatcctgccagtcagcatgaccaagacttctgtggactgcactatgtacatctgcggagacagcaccgaatgctctaacctgctgctgcagtacggctctttctgcacccagctgaaccgtgctctgactggaatcgccgtggagcaggacaagaacactcaggaagtcttcgctcaggtgaagcaaatctacaagaccccacctatcaaggacttcggcggattcaacttctcccagatcctgcctgacccctccaagccaagcaagcgctctttcatcgaggacctgctgttcaacaaggtcactctggccgacgctggattcatcaagcagtacggagactgcctgggtgacatcgccgctcgtgacctgatctgcgctcagaagttcaacggtctgaccgtgctgcccccactgctgactgacgaaatgatcgcccagtacactagcgccctgctggctggaaccatcacttctggttggaccttcggtgctggcgccgctctgcagatccctttcgctatgcagatggcctaccgtttcaacggaatcggtgtcacccagaacgtgctgtacgagaaccagaagctgatcgctaaccagttcaactcagccatcggaaagatccaggacagcctgagctctactgcctctgctctgggcaagctgcaggacgtcgtgaaccagaacgcccaggctctgaacaccctggtcaagcagctgtcatccaacttcggtgctatcagctctgtgctgaacgacatcctgtcccgcctggacaaggtcgaggccgaagtgcagatcgaccgcctgatcactggccgtctgcagtcactgcagacctacgtgactcagcagctgatcagggccgctgaaatcagagcctccgctaacctggccgctaccaagatgagcgagtgcgtcctgggtcaatctaagcgtgtggacttctgcggcaagggataccacctgatgtcattccctcagtctgctccccacggtgtggtgttcctgcacgtcacctacgtgccagcccaggagaagaacttcaccactgcccctgctatctgccacgacggcaaggctcacttccccagggaaggtgtcttcgtgagcaacggcacccactggttcgtcactcagagaaacttctacgagccacagatcatcaccactgacaacactttcgtgtctggaaactgcgacgtggtcatcggtatcgtcaacaacaccgtgtacgaccccctgcagccagagctggactcattcaaggaggaactggacaagtacttcaagaaccacacctcccctgacgtcgacctgggcgacatctcaggaatcaacgcttccgtcgtgaacatccagaaggagatcgaccgcctgaacgaagtggccaagaacctgaacgaaagcctgatcgacctgcaggagctgggcaagtacgaacagtacatcaagtggcctcaccaccaccaccaccac

SEQ ID NO: 44 - protein, 1219 aa, synthetic construct; identical to SEQ ID NO: 42
  REGION 1..1219: note = RECOMBINANT SPIKE PROTEIN

SEQ ID NO: 45 - protein, 318 aa, synthetic construct
  REGION 1..318: note = RECOMBINANT SPIKE PROTEIN
QCVNLTTRTQLPPAYTNSFTRGVYYPDKVFRSSVLHSTQDLFLPFFSNVTWFHAIHVSGTNGTKRFDNPVLPFNDGVYFASTEKSNIIRGWIFGTTLDSKTQSLLIVNNATNVVIKVCEFQFCNDPFLGVYYHKNNKSWMESEFRVYSSANNCTFEYVSQPFLMDLEGKQGNFKNLREFVFKNIDGYFKIYSKHTPINLVRDLPQGFSALEPLVDLPIGINITRFQTLLALHRSYLTPGDSSSGWTAGAAAYYVGYLQPRTFLLKYNENGTITDAVDCALDPLSETKCTLKSFTVEKGIYQTSNFRVQPTESIVRFPN

SEQ ID NO: 46 - protein, 955 aa, synthetic construct
  REGION 1..955: note = RECOMBINANT SPIKE PROTEIN
MFVFLVLLPLVSSITNLCPFGEVFNATRFASVYAWNRKRISNCVADYSVLYNSASFSTFKCYGVSPTKLNDLCFTNVYADSFVIRGDEVRQIAPGQTGKIADYNYKLPDDFTGCVIAWNSNNLDSKVGGNYNYLYRLFRKSNLKPFERDISTEIYQAGSTPCNGVEGFNCYFPLQSYGFQPTNGVGYQPYRVVVLSFELLHAPATVCGPKKSTNLVKNKCVNFNFNGLTGTGVLTESNKKFLPFQQFGRDIADTTDAVRDPQTLEILDITPCSFGGVSVITPGTNTSNQVAVLYQDVNCTEVPVAIHADQLTPTWRVYSTGSNVFQTRAGCLIGAEHVNNSYECDIPIGAGICASYQTQTNSPRRARSVASQSIIAYTMSLGAENSVAYSNNSIAIPTNFTISVTTEILPVSMTKTSVDCTMYICGDSTECSNLLLQYGSFCTQLNRALTGIAVEQDKNTQEVFAQVKQIYKTPPIKDFGGFNFSQILPDPSKPSKRSFIEDLLFNKVTLADAGFIKQYGDCLGDIAARDLICAQKFNGLTVLPPLLTDEMIAQYTSALLAGTITSGWTFGAGAALQIPFAMQMAYRFNGIGVTQNVLYENQKLIANQFNSAIGKIQDSLSSTASALGKLQDVVNQNAQALNTLVKQLSSNFGAISSVLNDILSRLDKVEAEVQIDRLITGRLQSLQTYVTQQLIRAAEIRASANLAATKMSECVLGQSKRVDFCGKGYHLMSFPQSAPHGVVFLHVTYVPAQEKNFTTAPAICHDGKAHFPREGVFVSNGTHWFVTQRNFYEPQIITTDNTFVSGNCDVVIGIVNNTVYDPLQPELDSFKEELDKYFKNHTSPDVDLGDISGINASVVNIQKEIDRLNEVAKNLNESLIDLQELGKYEQYIKWPWYIWLGFIAGLIAIVMVTIMLCCMTSCCSCLKGCCSCGSCCKFDEDDSEPVLKGVKLHYT

SEQ ID NO: 47 - DNA, 2868 bp, synthetic construct
  misc_feature 1..2868: note = RECOMBINANT SPIKE PROTEIN
  source 1..2868: mol_type = other DNA
atgttcgtcttcctggtgctgctgcccctggtgtccagcatcactaacctgtgccccttcggagaggtcttcaacgccacccgcttcgcttccgtgtacgcctggaacaggaagagaatctcaaactgcgtcgctgactactccgtgctgtacaactcagcctccttcagcaccttcaagtgctacggcgtgtcaccaactaagctgaacgacctgtgcttcaccaacgtctacgccgactccttcgtgatcaggggagacgaggtcagacagatcgctcctggccagactggaaagatcgccgactacaactacaagctgcccgacgacttcaccggttgcgtcatcgcttggaacagcaacaacctggactctaaagtgggtggcaactacaactacctgtaccgcctgttccgtaagtcaaacctgaagccattcgagagggacatcagcactgaaatctaccaggccggatctaccccttgcaacggtgtcgagggcttcaactgctacttccccctgcagtcctacggtttccagccaactaacggtgtgggctaccagccttacagagtggtcgtgctgagcttcgaactgctccacgctcctgctactgtgtgcggtccaaagaagtctaccaacctggtcaagaacaagtgcgtgaacttcaacttcaacggcctgaccggaactggtgtcctgaccgagagcaacaagaagttcctgcccttccagcagttcggaagggacatcgctgacaccactgacgctgtgcgcgaccctcagaccctggaaatcctggacatcactccatgctcattcggaggtgtctccgtgatcacccctggcaccaacacttctaaccaggtcgctgtgctgtaccaggacgtcaactgcaccgaggtccctgtggccatccacgctgaccagctgacccccacttggcgcgtgtactccaccggcagcaacgtgttccagactcgtgctggttgcctgatcggcgccgagcacgtgaacaacagctacgaatgcgacatccccatcggcgctggaatctgcgcctcttaccagacccagactaacagcccacgcagggctcgctctgtggcctctcagtcaatcatcgcttacaccatgtcactgggcgctgaaaactccgtggcctactctaacaactcaatcgccatccccaccaacttcactatcagcgtgaccactgagatcctgccagtcagcatgaccaagacttctgtggactgcactatgtacatctgcggagacagcaccgaatgctctaacctgctgctgcagtacggctctttctgcacccagctgaaccgtgctctgactggaatcgccgtggagcaggacaagaacactcaggaagtcttcgctcaggtgaagcaaatctacaagaccccacctatcaaggacttcggcggattcaacttctcccagatcctgcctgacccctccaagccaagcaagcgctctttcatcgaggacctgctgttcaacaaggtcactctggccgacgctggattcatcaagcagtacggagactgcctgggtgacatcgccgctcgtgacctgatctgcgctcagaagttcaacggtctgaccgtgctgcccccactgctgactgacgaaatgatcgcccagtacactagcgccctgctggctggaaccatcacttctggttggaccttcggtgctggcgccgctctgcagatccctttcgctatgcagatggcctaccgtttcaacggaatcggtgtcacccagaacgtgctgtacgagaaccagaagctgatcgctaaccagttcaactcagccatcggaaagatccaggacagcctgagctctactgcctctgctctgggcaagctgcaggacgtcgtgaaccagaacgcccaggctctgaacaccctggtcaagcagctgtcatccaacttcggtgctatcagctctgtgctgaacgacatcctgtcccgcctggacaaggtcgaggccgaagtgcagatcgaccgcctgatcactggccgtctgcagtcactgcagacctacgtgactcagcagctgatcagggccgctgaaatcagagcctccgctaacctggccgctaccaagatgagcgagtgcgtcctgggtcaatctaagcgtgtggacttctgcggcaagggataccacctgatgtcattccctcagtctgctccccacggtgtggtgttcctgcacgtcacctacgtgccagcccaggagaagaacttcaccactgcccctgctatctgccacgacggcaaggctcacttccccagggaaggtgtcttcgtgagcaacggcacccactggttcgtcactcagagaaacttctacgagccacagatcatcaccactgacaacactttcgtgtctggaaactgcgacgtggtcatcggtatcgtcaacaacaccgtgtacgaccccctgcagccagagctggactcattcaaggaggaactggacaagtacttcaagaaccacacctcccctgacgtcgacctgggcgacatctcaggaatcaacgcttccgtcgtgaacatccagaaggagatcgaccgcctgaacgaagtggccaagaacctgaacgaaagcctgatcgacctgcaggagctgggcaagtacgaacagtacatcaagtggccttggtacatctggctgggtttcatcgctggcctcatcgctatcgtgatggtgaccatcatgctgtgctgcatgacttcatgctgctcctgcctgaagggctgctgcagctgcggatcttgctgcaagttcgacgaggacgactctgaacccgtcctgaagggcgtgaagctgcactacacctaa

SEQ ID NO: 48 - protein, 942 aa, synthetic construct
  REGION 1..942: note = RECOMBINANT SPIKE PROTEIN
ITNLCPFGEVFNATRFASVYAWNRKRISNCVADYSVLYNSASFSTFKCYGVSPTKLNDLCFTNVYADSFVIRGDEVRQIAPGQTGKIADYNYKLPDDFTGCVIAWNSNNLDSKVGGNYNYLYRLFRKSNLKPFERDISTEIYQAGSTPCNGVEGFNCYFPLQSYGFQPTNGVGYQPYRVVVLSFELLHAPATVCGPKKSTNLVKNKCVNFNFNGLTGTGVLTESNKKFLPFQQFGRDIADTTDAVRDPQTLEILDITPCSFGGVSVITPGTNTSNQVAVLYQDVNCTEVPVAIHADQLTPTWRVYSTGSNVFQTRAGCLIGAEHVNNSYECDIPIGAGICASYQTQTNSPRRARSVASQSIIAYTMSLGAENSVAYSNNSIAIPTNFTISVTTEILPVSMTKTSVDCTMYICGDSTECSNLLLQYGSFCTQLNRALTGIAVEQDKNTQEVFAQVKQIYKTPPIKDFGGFNFSQILPDPSKPSKRSFIEDLLFNKVTLADAGFIKQYGDCLGDIAARDLICAQKFNGLTVLPPLLTDEMIAQYTSALLAGTITSGWTFGAGAALQIPFAMQMAYRFNGIGVTQNVLYENQKLIANQFNSAIGKIQDSLSSTASALGKLQDVVNQNAQALNTLVKQLSSNFGAISSVLNDILSRLDKVEAEVQIDRLITGRLQSLQTYVTQQLIRAAEIRASANLAATKMSECVLGQSKRVDFCGKGYHLMSFPQSAPHGVVFLHVTYVPAQEKNFTTAPAICHDGKAHFPREGVFVSNGTHWFVTQRNFYEPQIITTDNTFVSGNCDVVIGIVNNTVYDPLQPELDSFKEELDKYFKNHTSPDVDLGDISGINASVVNIQKEIDRLNEVAKNLNESLIDLQELGKYEQYIKWPWYIWLGFIAGLIAIVMVTIMLCCMTSCCSCLKGCCSCGSCCKFDEDDSEPVLKGVKLHYT

SEQ ID NO: 49 - protein, 960 aa, synthetic construct
  REGION 1..960: note = RECOMBINANT SPIKE PROTEIN
MFVFLVLLPLVSSITNLCPFGEVFNATRFASVYAWNRKRISNCVADYSVLYNSASFSTFKCYGVSPTKLNDLCFTNVYADSFVIRGDEVRQIAPGQTGKIADYNYKLPDDFTGCVIAWNSNNLDSKVGGNYNYLYRLFRKSNLKPFERDISTEIYQAGSTPCNGVEGFNCYFPLQSYGFQPTNGVGYQPYRVVVLSFELLHAPATVCGPKKSTNLVKNKCVNFNFNGLTGTGVLTESNKKFLPFQQFGRDIADTTDAVRDPQTLEILDITPCSFGGVSVITPGTNTSNQVAVLYQDVNCTEVPVAIHADQLTPTWRVYSTGSNVFQTRAGCLIGAEHVNNSYECDIPIGAGICASYQTQTNSPRRARSVASQSIIAYTMSLGAENSVAYSNNSIAIPTNFTISVTTEILPVSMTKTSVDCTMYICGDSTECSNLLLQYGSFCTQLNRALTGIAVEQDKNTQEVFAQVKQIYKTPPIKDFGGFNFSQILPDPSKPSKRSFIEDLLFNKVTLADAGFIKQYGDCLGDIAARDLICAQKFNGLTVLPPLLTDEMIAQYTSALLAGTITSGWTFGAGAALQIPFAMQMAYRFNGIGVTQNVLYENQKLIANQFNSAIGKIQDSLSSTASALGKLQDVVNQNAQALNTLVKQLSSNFGAISSVLNDILSRLDKVEAEVQIDRLITGRLQSLQTYVTQQLIRAAEIRASANLAATKMSECVLGQSKRVDFCGKGYHLMSFPQSAPHGVVFLHVTYVPAQEKNFTTAPAICHDGKAHFPREGVFVSNGTHWFVTQRNFYEPQIITTDNTFVSGNCDVVIGIVNNTVYDPLQPELDSFKEELDKYFKNHTSPDVDLGDISGINASVVNIQKEIDRLNEVAKNLNESLIDLQELGKYEQYIKWPWYIWLGFIAGLIAIVMVTIMLCCMTSCCSCLKGCCSCGSCCKFDEDDSEPVLKGVKLHYTHHHHH

SEQ ID NO: 50 - DNA, 2883 bp, synthetic construct
  misc_feature 1..2883: note = RECOMBINANT SPIKE PROTEIN
  source 1..2883: mol_type = other DNA
atgttcgtcttcctggtgctgctgcccctggtgtccagcatcactaacctgtgccccttcggagaggtcttcaacgccacccgcttcgcttccgtgtacgcctggaacaggaagagaatctcaaactgcgtcgctgactactccgtgctgtacaactcagcctccttcagcaccttcaagtgctacggcgtgtcaccaactaagctgaacgacctgtgcttcaccaacgtctacgccgactccttcgtgatcaggggagacgaggtcagacagatcgctcctggccagactggaaagatcgccgactacaactacaagctgcccgacgacttcaccggttgcgtcatcgcttggaacagcaacaacctggactctaaagtgggtggcaactacaactacctgtaccgcctgttccgtaagtcaaacctgaagccattcgagagggacatcagcactgaaatctaccaggccggatctaccccttgcaacggtgtcgagggcttcaactgctacttccccctgcagtcctacggtttccagccaactaacggtgtgggctaccagccttacagagtggtcgtgctgagcttcgaactgctccacgctcctgctactgtgtgcggtccaaagaagtctaccaacctggtcaagaacaagtgcgtgaacttcaacttcaacggcctgaccggaactggtgtcctgaccgagagcaacaagaagttcctgcccttccagcagttcggaagggacatcgctgacaccactgacgctgtgcgcgaccctcagaccctggaaatcctggacatcactccatgctcattcggaggtgtctccgtgatcacccctggcaccaacacttctaaccaggtcgctgtgctgtaccaggacgtcaactgcaccgaggtccctgtggccatccacgctgaccagctgacccccacttggcgcgtgtactccaccggcagcaacgtgttccagactcgtgctggttgcctgatcggcgccgagcacgtgaacaacagctacgaatgcgacatccccatcggcgctggaatctgcgcctcttaccagacccagactaacagcccacgcagggctcgctctgtggcctctcagtcaatcatcgcttacaccatgtcactgggcgctgaaaactccgtggcctactctaacaactcaatcgccatccccaccaacttcactatcagcgtgaccactgagatcctgccagtcagcatgaccaagacttctgtggactgcactatgtacatctgcggagacagcaccgaatgctctaacctgctgctgcagtacggctctttctgcacccagctgaaccgtgctctgactggaatcgccgtggagcaggacaagaacactcaggaagtcttcgctcaggtgaagcaaatctacaagaccccacctatcaaggacttcggcggattcaacttctcccagatcctgcctgacccctccaagccaagcaagcgctctttcatcgaggacctgctgttcaacaaggtcactctggccgacgctggattcatcaagcagtacggagactgcctgggtgacatcgccgctcgtgacctgatctgcgctcagaagttcaacggtctgaccgtgctgcccccactgctgactgacgaaatgatcgcccagtacactagcgccctgctggctggaaccatcacttctggttggaccttcggtgctggcgccgctctgcagatccctttcgctatgcagatggcctaccgtttcaacggaatcggtgtcacccagaacgtgctgtacgagaaccagaagctgatcgctaaccagttcaactcagccatcggaaagatccaggacagcctgagctctactgcctctgctctgggcaagctgcaggacgtcgtgaaccagaacgcccaggctctgaacaccctggtcaagcagctgtcatccaacttcggtgctatcagctctgtgctgaacgacatcctgtcccgcctggacaaggtcgaggccgaagtgcagatcgaccgcctgatcactggccgtctgcagtcactgcagacctacgtgactcagcagctgatcagggccgctgaaatcagagcctccgctaacctggccgctaccaagatgagcgagtgcgtcctgggtcaatctaagcgtgtggacttctgcggcaagggataccacctgatgtcattccctcagtctgctccccacggtgtggtgttcctgcacgtcacctacgtgccagcccaggagaagaacttcaccactgcccctgctatctgccacgacggcaaggctcacttccccagggaaggtgtcttcgtgagcaacggcacccactggttcgtcactcagagaaacttctacgagccacagatcatcaccactgacaacactttcgtgtctggaaactgcgacgtggtcatcggtatcgtcaacaacaccgtgtacgaccccctgcagccagagctggactcattcaaggaggaactggacaagtacttcaagaaccacacctcccctgacgtcgacctgggcgacatctcaggaatcaacgcttccgtcgtgaacatccagaaggagatcgaccgcctgaacgaagtggccaagaacctgaacgaaagcctgatcgacctgcaggagctgggcaagtacgaacagtacatcaagtggccttggtacatctggctgggtttcatcgctggcctcatcgctatcgtgatggtgaccatcatgctgtgctgcatgacttcatgctgctcctgcctgaagggctgctgcagctgcggatcttgctgcaagttcgacgaggacgactctgaacccgtcctgaagggcgtgaagctgcactacacccaccaccaccaccaccac

SEQ ID NO: 51 - protein, 947 aa, synthetic construct
  REGION 1..947: note = RECOMBINANT SPIKE PROTEIN
ITNLCPFGEVFNATRFASVYAWNRKRISNCVADYSVLYNSASFSTFKCYGVSPTKLNDLCFTNVYADSFVIRGDEVRQIAPGQTGKIADYNYKLPDDFTGCVIAWNSNNLDSKVGGNYNYLYRLFRKSNLKPFERDISTEIYQAGSTPCNGVEGFNCYFPLQSYGFQPTNGVGYQPYRVVVLSFELLHAPATVCGPKKSTNLVKNKCVNFNFNGLTGTGVLTESNKKFLPFQQFGRDIADTTDAVRDPQTLEILDITPCSFGGVSVITPGTNTSNQVAVLYQDVNCTEVPVAIHADQLTPTWRVYSTGSNVFQTRAGCLIGAEHVNNSYECDIPIGAGICASYQTQTNSPRRARSVASQSIIAYTMSLGAENSVAYSNNSIAIPTNFTISVTTEILPVSMTKTSVDCTMYICGDSTECSNLLLQYGSFCTQLNRALTGIAVEQDKNTQEVFAQVKQIYKTPPIKDFGGFNFSQILPDPSKPSKRSFIEDLLFNKVTLADAGFIKQYGDCLGDIAARDLICAQKFNGLTVLPPLLTDEMIAQYTSALLAGTITSGWTFGAGAALQIPFAMQMAYRFNGIGVTQNVLYENQKLIANQFNSAIGKIQDSLSSTASALGKLQDVVNQNAQALNTLVKQLSSNFGAISSVLNDILSRLDKVEAEVQIDRLITGRLQSLQTYVTQQLIRAAEIRASANLAATKMSECVLGQSKRVDFCGKGYHLMSFPQSAPHGVVFLHVTYVPAQEKNFTTAPAICHDGKAHFPREGVFVSNGTHWFVTQRNFYEPQIITTDNTFVSGNCDVVIGIVNNTVYDPLQPELDSFKEELDKYFKNHTSPDVDLGDISGINASVVNIQKEIDRLNEVAKNLNESLIDLQELGKYEQYIKWPWYIWLGFIAGLIAIVMVTIMLCCMTSCCSCLKGCCSCGSCCKFDEDDSEPVLKGVKLHYTHHHHH

SEQ ID NO: 52 - protein, 901 aa, synthetic construct
  REGION 1..901: note = RECOMBINANT SPIKE PROTEIN
MFVFLVLLPLVSSITNLCPFGEVFNATRFASVYAWNRKRISNCVADYSVLYNSASFSTFKCYGVSPTKLNDLCFTNVYADSFVIRGDEVRQIAPGQTGKIADYNYKLPDDFTGCVIAWNSNNLDSKVGGNYNYLYRLFRKSNLKPFERDISTEIYQAGSTPCNGVEGFNCYFPLQSYGFQPTNGVGYQPYRVVVLSFELLHAPATVCGPKKSTNLVKNKCVNFNFNGLTGTGVLTESNKKFLPFQQFGRDIADTTDAVRDPQTLEILDITPCSFGGVSVITPGTNTSNQVAVLYQDVNCTEVPVAIHADQLTPTWRVYSTGSNVFQTRAGCLIGAEHVNNSYECDIPIGAGICASYQTQTNSPRRARSVASQSIIAYTMSLGAENSVAYSNNSIAIPTNFTISVTTEILPVSMTKTSVDCTMYICGDSTECSNLLLQYGSFCTQLNRALTGIAVEQDKNTQEVFAQVKQIYKTPPIKDFGGFNFSQILPDPSKPSKRSFIEDLLFNKVTLADAGFIKQYGDCLGDIAARDLICAQKFNGLTVLPPLLTDEMIAQYTSALLAGTITSGWTFGAGAALQIPFAMQMAYRFNGIGVTQNVLYENQKLIANQFNSAIGKIQDSLSSTASALGKLQDVVNQNAQALNTLVKQLSSNFGAISSVLNDILSRLDKVEAEVQIDRLITGRLQSLQTYVTQQLIRAAEIRASANLAATKMSECVLGQSKRVDFCGKGYHLMSFPQSAPHGVVFLHVTYVPAQEKNFTTAPAICHDGKAHFPREGVFVSNGTHWFVTQRNFYEPQIITTDNTFVSGNCDVVIGIVNNTVYDPLQPELDSFKEELDKYFKNHTSPDVDLGDISGINASVVNIQKEIDRLNEVAKNLNESLIDLQELGKYEQYIKWPHHHHHH

SEQ ID NO: 53 - DNA, 2706 bp, synthetic construct
  misc_feature 1..2706: note = RECOMBINANT SPIKE PROTEIN
  source 1..2706: mol_type = other DNA
atgttcgtcttcctggtgctgctgcccctggtgtccagcatcactaacctgtgccccttcggagaggtcttcaacgccacccgcttcgcttccgtgtacgcctggaacaggaagagaatctcaaactgcgtcgctgactactccgtgctgtacaactcagcctccttcagcaccttcaagtgctacggcgtgtcaccaactaagctgaacgacctgtgcttcaccaacgtctacgccgactccttcgtgatcaggggagacgaggtcagacagatcgctcctggccagactggaaagatcgccgactacaactacaagctgcccgacgacttcaccggttgcgtcatcgcttggaacagcaacaacctggactctaaagtgggtggcaactacaactacctgtaccgcctgttccgtaagtcaaacctgaagccattcgagagggacatcagcactgaaatctaccaggccggatctaccccttgcaacggtgtcgagggcttcaactgctacttccccctgcagtcctacggtttccagccaactaacggtgtgggctaccagccttacagagtggtcgtgctgagcttcgaactgctccacgctcctgctactgtgtgcggtccaaagaagtctaccaacctggtcaagaacaagtgcgtgaacttcaacttcaacggcctgaccggaactggtgtcctgaccgagagcaacaagaagttcctgcccttccagcagttcggaagggacatcgctgacaccactgacgctgtgcgcgaccctcagaccctggaaatcctggacatcactccatgctcattcggaggtgtctccgtgatcacccctggcaccaacacttctaaccaggtcgctgtgctgtaccaggacgtcaactgcaccgaggtccctgtggccatccacgctgaccagctgacccccacttggcgcgtgtactccaccggcagcaacgtgttccagactcgtgctggttgcctgatcggcgccgagcacgtgaacaacagctacgaatgcgacatccccatcggcgctggaatctgcgcctcttaccagacccagactaacagcccacgcagggctcgctctgtggcctctcagtcaatcatcgcttacaccatgtcactgggcgctgaaaactccgtggcctactctaacaactcaatcgccatccccaccaacttcactatcagcgtgaccactgagatcctgccagtcagcatgaccaagacttctgtggactgcactatgtacatctgcggagacagcaccgaatgctctaacctgctgctgcagtacggctctttctgcacccagctgaaccgtgctctgactggaatcgccgtggagcaggacaagaacactcaggaagtcttcgctcaggtgaagcaaatctacaagaccccacctatcaaggacttcggcggattcaacttctcccagatcctgcctgacccctccaagccaagcaagcgctctttcatcgaggacctgctgttcaacaaggtcactctggccgacgctggattcatcaagcagtacggagactgcctgggtgacatcgccgctcgtgacctgatctgcgctcagaagttcaacggtctgaccgtgctgcccccactgctgactgacgaaatgatcgcccagtacactagcgccctgctggctggaaccatcacttctggttggaccttcggtgctggcgccgctctgcagatccctttcgctatgcagatggcctaccgtttcaacggaatcggtgtcacccagaacgtgctgtacgagaaccagaagctgatcgctaaccagttcaactcagccatcggaaagatccaggacagcctgagctctactgcctctgctctgggcaagctgcaggacgtcgtgaaccagaacgcccaggctctgaacaccctggtcaagcagctgtcatccaacttcggtgctatcagctctgtgctgaacgacatcctgtcccgcctggacaaggtcgaggccgaagtgcagatcgaccgcctgatcactggccgtctgcagtcactgcagacctacgtgactcagcagctgatcagggccgctgaaatcagagcctccgctaacctggccgctaccaagatgagcgagtgcgtcctgggtcaatctaagcgtgtggacttctgcggcaagggataccacctgatgtcattccctcagtctgctccccacggtgtggtgttcctgcacgtcacctacgtgccagcccaggagaagaacttcaccactgcccctgctatctgccacgacggcaaggctcacttccccagggaaggtgtcttcgtgagcaacggcacccactggttcgtcactcagagaaacttctacgagccacagatcatcaccactgacaacactttcgtgtctggaaactgcgacgtggtcatcggtatcgtcaacaacaccgtgtacgaccccctgcagccagagctggactcattcaaggaggaactggacaagtacttcaagaaccacacctcccctgacgtcgacctgggcgacatctcaggaatcaacgcttccgtcgtgaacatccagaaggagatcgaccgcctgaacgaagtggccaagaacctgaacgaaagcctgatcgacctgcaggagctgggcaagtacgaacagtacatcaagtggcctcaccaccaccaccaccaccac

SEQ ID NO: 54 - protein, 888 aa, synthetic construct
  REGION 1..888: note = RECOMBINANT SPIKE PROTEIN
ITNLCPFGEVFNATRFASVYAWNRKRISNCVADYSVLYNSASFSTFKCYGVSPTKLNDLCFTNVYADSFVIRGDEVRQIAPGQTGKIADYNYKLPDDFTGCVIAWNSNNLDSKVGGNYNYLYRLFRKSNLKPFERDISTEIYQAGSTPCNGVEGFNCYFPLQSYGFQPTNGVGYQPYRVVVLSFELLHAPATVCGPKKSTNLVKNKCVNFNFNGLTGTGVLTESNKKFLPFQQFGRDIADTTDAVRDPQTLEILDITPCSFGGVSVITPGTNTSNQVAVLYQDVNCTEVPVAIHADQLTPTWRVYSTGSNVFQTRAGCLIGAEHVNNSYECDIPIGAGICASYQTQTNSPRRARSVASQSIIAYTMSLGAENSVAYSNNSIAIPTNFTISVTTEILPVSMTKTSVDCTMYICGDSTECSNLLLQYGSFCTQLNRALTGIAVEQDKNTQEVFAQVKQIYKTPPIKDFGGFNFSQILPDPSKPSKRSFIEDLLFNKVTLADAGFIKQYGDCLGDIAARDLICAQKFNGLTVLPPLLTDEMIAQYTSALLAGTITSGWTFGAGAALQIPFAMQMAYRFNGIGVTQNVLYENQKLIANQFNSAIGKIQDSLSSTASALGKLQDVVNQNAQALNTLVKQLSSNFGAISSVLNDILSRLDKVEAEVQIDRLITGRLQSLQTYVTQQLIRAAEIRASANLAATKMSECVLGQSKRVDFCGKGYHLMSFPQSAPHGVVFLHVTYVPAQEKNFTTAPAICHDGKAHFPREGVFVSNGTHWFVTQRNFYEPQIITTDNTFVSGNCDVVIGIVNNTVYDPLQPELDSFKEELDKYFKNHTSPDVDLGDISGINASVVNIQKEIDRLNEVAKNLNESLIDLQELGKYEQYIKWPHHHHHH

SEQ ID NO: 55 - DNA, 3819 bp, synthetic construct
  misc_feature 1..3819: note = RECOMBINANT SPIKE PROTEIN
  source 1..3819: mol_type = other DNA
atgttcgtcttcctggtgctgctgcccctggtgtccagccagtgcgtgaacctgaccactaggactcagctgcctcccgcttacaccaactcattcactcgcggtgtgtactaccctgacaaggtcttccgttcttcagtgctgcactcaactcaggacctgttcctgcccttcttctccaacgtcacctggttccacgccatccacgtgtccggcaccaacggcactaagcgcttcgacaacccagtgctgcctttcaacgacggtgtctacttcgcttcaaccgagaagtccaacatcatccgtggatggatcttcggcaccactctggacagcaagactcagtctctgctgatcgtcaacaacgccaccaacgtggtcatcaaggtctgcgaattccagttctgcaacgacccattcctgggcgtctactaccacaagaacaacaagtcatggatggagtccgaattccgcgtctactccagcgctaacaactgcactttcgagtacgtgtcccagcctttcctgatggacctggaaggaaagcagggtaacttcaagaacctgagggagttcgtgttcaagaacatcgacggatacttcaagatttacagcaagcacaccccaatcaacctggtgcgcgacctgcctcagggtttctctgctctggagccactggtggacctgcctatcggcatcaacatcacccgcttccagactctgctggctctgcaccgttcctacctgactccaggcgactcatcttctggatggactgctggagctgctgcttactacgtgggctacctgcagcctcgcaccttcctgctgaagtacaacgaaaacggaaccatcactgacgccgtcgactgcgctctggaccctctgtcagaaaccaagtgcactctgaagtccttcaccgtggagaagggcatctaccagacttcaaacttcagggtgcagcccaccgaatccatcgtcagattccctaacatcactaacctgtgccccttcggagaggtcttcaacgccacccgcttcgcttccgtgtacgcctggaacaggaagagaatctcaaactgcgtcgctgactactccgtgctgtacaactcagcctccttcagcaccttcaagtgctacggcgtgtcaccaactaagctgaacgacctgtgcttcaccaacgtctacgccgactccttcgtgatcaggggagacgaggtcagacagatcgctcctggccagactggaaagatcgccgactacaactacaagctgcccgacgacttcaccggttgcgtcatcgcttggaacagcaacaacctggactctaaagtgggtggcaactacaactacctgtaccgcctgttccgtaagtcaaacctgaagccattcgagagggacatcagcactgaaatctaccaggccggatctaccccttgcaacggtgtcgagggcttcaactgctacttccccctgcagtcctacggtttccagccaactaacggtgtgggctaccagccttacagagtggtcgtgctgagcttcgaactgctccacgctcctgctactgtgtgcggtccaaagaagtctaccaacctggtcaagaacaagtgcgtgaacttcaacttcaacggcctgaccggaactggtgtcctgaccgagagcaacaagaagttcctgcccttccagcagttcggaagggacatcgctgacaccactgacgctgtgcgcgaccctcagaccctggaaatcctggacatcactccatgctcattcggaggtgtctccgtgatcacccctggcaccaacacttctaaccaggtcgctgtgctgtaccaggacgtcaactgcaccgaggtccctgtggccatccacgctgaccagctgacccccacttggcgcgtgtactccaccggcagcaacgtgttccagactcgtgctggttgcctgatcggcgccgagcacgtgaacaacagctacgaatgcgacatccccatcggcgctggaatctgcgcctcttaccagacccagactaacagcccacagcaggctcagtctgtggcctctcagtcaatcatcgcttacaccatgtcactgggcgctgaaaactccgtggcctactctaacaactcaatcgccatccccaccaacttcactatcagcgtgaccactgagatcctgccagtcagcatgaccaagacttctgtggactgcactatgtacatctgcggagacagcaccgaatgctctaacctgctgctgcagtacggctctttctgcacccagctgaaccgtgctctgactggaatcgccgtggagcaggacaagaacactcaggaagtcttcgctcaggtgaagcaaatctacaagaccccacctatcaaggacttcggcggattcaacttctcccagatcctgcctgacccctccaagccaagcaagcgctctttcatcgaggacctgctgttcaacaaggtcactctggccgacgctggattcatcaagcagtacggagactgcctgggtgacatcgccgctcgtgacctgatctgcgctcagaagttcaacggtctgaccgtgctgcccccactgctgactgacgaaatgatcgcccagtacactagcgccctgctggctggaaccatcacttctggttggaccttcggtgctggcgccgctctgcagatccctttcgctatgcagatggcctaccgtttcaacggaatcggtgtcacccagaacgtgctgtacgagaaccagaagctgatcgctaaccagttcaactcagccatcggaaagatccaggacagcctgagctctactgcctctgctctgggcaagctgcaggacgtcgtgaaccagaacgcccaggctctgaacaccctggtcaagcagctgtcatccaacttcggtgctatcagctctgtgctgaacgacatcctgtcccgcctggacaaggtcgaggccgaagtgcagatcgaccgcctgatcactggccgtctgcagtcactgcagacctacgtgactcagcagctgatcagggccgctgaaatcagagcctccgctaacctggccgctaccaagatgagcgagtgcgtcctgggtcaatctaagcgtgtggacttctgcggcaagggataccacctgatgtcattccctcagtctgctccccacggtgtggtgttcctgcacgtcacctacgtgccagcccaggagaagaacttcaccactgcccctgctatctgccacgacggcaaggctcacttccccagggaaggtgtcttcgtgagcaacggcacccactggttcgtcactcagagaaacttctacgagccacagatcatcaccactgacaacactttcgtgtctggaaactgcgacgtggtcatcggtatcgtcaacaacaccgtgtacgaccccctgcagccagagctggactcattcaaggaggaactggacaagtacttcaagaaccacacctcccctgacgtcgacctgggcgacatctcaggaatcaacgcttccgtcgtgaacatccagaaggagatcgaccgcctgaacgaagtggccaagaacctgaacgaaagcctgatcgacctgcaggagctgggcaagtacgaacagtacatcaagtggccttggtacatctggctgggtttcatcgctggcctcatcgctatcgtgatggtgaccatcatgctgtgctgcatgacttcatgctgctcctgcctgaagggctgctgcagctgcggatcttgctgcaagttcgacgaggacgactctgaacccgtcctgaagggcgtgaagctgcactacacc

SEQ ID NO: 56 - protein, 1279 aa, synthetic construct
  REGION 1..1279: note = RECOMBINANT SPIKE PROTEIN
MFVFLVLLPLVSSQCVNLTTRTQLPPAYTNSFTRGVYYPDKVFRSSVLHSTQDLFLPFFSNVTWFHAIHVSGTNGTKRFDNPVLPFNDGVYFASTEKSNIIRGWIFGTTLDSKTQSLLIVNNATNVVIKVCEFQFCNDPFLGVYYHKNNKSWMESEFRVYSSANNCTFEYVSQPFLMDLEGKQGNFKNLREFVFKNIDGYFKIYSKHTPINLVRDLPQGFSALEPLVDLPIGINITRFQTLLALHRSYLTPGDSSSGWTAGAAAYYVGYLQPRTFLLKYNENGTITDAVDCALDPLSETKCTLKSFTVEKGIYQTSNFRVQPTESIVRFPNITNLCPFGEVFNATRFASVYAWNRKRISNCVADYSVLYNSASFSTFKCYGVSPTKLNDLCFTNVYADSFVIRGDEVRQIAPGQTGKIADYNYKLPDDFTGCVIAWNSNNLDSKVGGNYNYLYRLFRKSNLKPFERDISTEIYQAGSTPCNGVEGFNCYFPLQSYGFQPTNGVGYQPYRVVVLSFELLHAPATVCGPKKSTNLVKNKCVNFNFNGLTGTGVLTESNKKFLPFQQFGRDIADTTDAVRDPQTLEILDITPCSFGGVSVITPGTNTSNQVAVLYQDVNCTEVPVAIHADQLTPTWRVYSTGSNVFQTRAGCLIGAEHVNNSYECDIPIGAGICASYQTQTNSPQQAQSVASQSIIAYTMSLGAENSVAYSNNSIAIPTNFTISVTTEILPVSMTKTSVDCTMYICGDSTECSNLLLQYGSFCTQLNRALTGIAVEQDKNTQEVFAQVKQIYKTPPIKDFGGFNFSQILPDPSKPSKRSFIEDLLFNKVTLADAGFIKQYGDCLGDIAARDLICAQKFNGLTVLPPLLTDEMIAQYTSALLAGTITSGWTFGAGAALQIPFAMQMAYRFNGIGVTQNVLYENQKLIANQFNSAIGKIQDSLSSTASALGKLQDVVNQNAQALNTLVKQLSSNFGAISSVLNDILSRLDKVEAEVQIDRLITGRLQSLQTYVTQQLIRAAEIRASANLAATKMSECVLGQSKRVDFCGKGYHLMSFPQSAPHGVVFLHVTYVPAQEKNFTTAPAICHDGKAHFPREGVFVSNGTHWFVTQRNFYEPQIITTDNTFVSGNCDVVIGIVNNTVYDPLQPELDSFKEELDKYFKNHTSPDVDLGDISGINASVVNIQKEIDRLNEVAKNLNESLIDLQELGKYEQYIKWPWYIWLGFIAGLIAIVMVTIMLCCMTSCCSCLKGCCSCGSCCKFDEDDSEPVLKGVKLHYTHHHHHH

SEQ ID NO: 57 - DNA, 3837 bp, synthetic construct
  misc_feature 1..3837: note = RECOMBINANT SPIKE PROTEIN
  source 1..3837: mol_type = other DNA
atgttcgtcttcctggtgctgctgcccctggtgtccagccagtgcgtgaacctgaccactaggactcagctgcctcccgcttacaccaactcattcactcgcggtgtgtactaccctgacaaggtcttccgttcttcagtgctgcactcaactcaggacctgttcctgcccttcttctccaacgtcacctggttccacgccatccacgtgtccggcaccaacggcactaagcgcttcgacaacccagtgctgcctttcaacgacggtgtctacttcgcttcaaccgagaagtccaacatcatccgtggatggatcttcggcaccactctggacagcaagactcagtctctgctgatcgtcaacaacgccaccaacgtggtcatcaaggtctgcgaattccagttctgcaacgacccattcctgggcgtctactaccacaagaacaacaagtcatggatggagtccgaattccgcgtctactccagcgctaacaactgcactttcgagtacgtgtcccagcctttcctgatggacctggaaggaaagcagggtaacttcaagaacctgagggagttcgtgttcaagaacatcgacggatacttcaagatttacagcaagcacaccccaatcaacctggtgcgcgacctgcctcagggtttctctgctctggagccactggtggacctgcctatcggcatcaacatcacccgcttccagactctgctggctctgcaccgttcctacctgactccaggcgactcatcttctggatggactgctggagctgctgcttactacgtgggctacctgcagcctcgcaccttcctgctgaagtacaacgaaaacggaaccatcactgacgccgtcgactgcgctctggaccctctgtcagaaaccaagtgcactctgaagtccttcaccgtggagaagggcatctaccagacttcaaacttcagggtgcagcccaccgaatccatcgtcagattccctaacatcactaacctgtgccccttcggagaggtcttcaacgccacccgcttcgcttccgtgtacgcctggaacaggaagagaatctcaaactgcgtcgctgactactccgtgctgtacaactcagcctccttcagcaccttcaagtgctacggcgtgtcaccaactaagctgaacgacctgtgcttcaccaacgtctacgccgactccttcgtgatcaggggagacgaggtcagacagatcgctcctggccagactggaaagatcgccgactacaactacaagctgcccgacgacttcaccggttgcgtcatcgcttggaacagcaacaacctggactctaaagtgggtggcaactacaactacctgtaccgcctgttccgtaagtcaaacctgaagccattcgagagggacatcagcactgaaatctaccaggccggatctaccccttgcaacggtgtcgagggcttcaactgctacttccccctgcagtcctacggtttccagccaactaacggtgtgggctaccagccttacagagtggtcgtgctgagcttcgaactgctccacgctcctgctactgtgtgcggtccaaagaagtctaccaacctggtcaagaacaagtgcgtgaacttcaacttcaacggcctgaccggaactggtgtcctgaccgagagcaacaagaagttcctgcccttccagcagttcggaagggacatcgctgacaccactgacgctgtgcgcgaccctcagaccctggaaatcctggacatcactccatgctcattcggaggtgtctccgtgatcacccctggcaccaacacttctaaccaggtcgctgtgctgtaccaggacgtcaactgcaccgaggtccctgtggccatccacgctgaccagctgacccccacttggcgcgtgtactccaccggcagcaacgtgttccagactcgtgctggttgcctgatcggcgccgagcacgtgaacaacagctacgaatgcgacatccccatcggcgctggaatctgcgcctcttaccagacccagactaacagcccacagcaggctcagtctgtggcctctcagtcaatcatcgcttacaccatgtcactgggcgctgaaaactccgtggcctactctaacaactcaatcgccatccccaccaacttcactatcagcgtgaccactgagatcctgccagtcagcatgaccaagacttctgtggactgcactatgtacatctgcggagacagcaccgaatgctctaacctgctgctgcagtacggctctttctgcacccagctgaaccgtgctctgactggaatcgccgtggagcaggacaagaacactcaggaagtcttcgctcaggtgaagcaaatctacaagaccccacctatcaaggacttcggcggattcaacttctcccagatcctgcctgacccctccaagccaagcaagcgctctttcatcgaggacctgctgttcaacaaggtcactctggccgacgctggattcatcaagcagtacggagactgcctgggtgacatcgccgctcgtgacctgatctgcgctcagaagttcaacggtctgaccgtgctgcccccactgctgactgacgaaatgatcgcccagtacactagcgccctgctggctggaaccatcacttctggttggaccttcggtgctggcgccgctctgcagatccctttcgctatgcagatggcctaccgtttcaacggaatcggtgtcacccagaacgtgctgtacgagaaccagaagctgatcgctaaccagttcaactcagccatcggaaagatccaggacagcctgagctctactgcctctgctctgggcaagctgcaggacgtcgtgaaccagaacgcccaggctctgaacaccctggtcaagcagctgtcatccaacttcggtgctatcagctctgtgctgaacgacatcctgtcccgcctggacaaggtcgaggccgaagtgcagatcgaccgcctgatcactggccgtctgcagtcactgcagacctacgtgactcagcagctgatcagggccgctgaaatcagagcctccgctaacctggccgctaccaagatgagcgagtgcgtcctgggtcaatctaagcgtgtggacttctgcggcaagggataccacctgatgtcattccctcagtctgctccccacggtgtggtgttcctgcacgtcacctacgtgccagcccaggagaagaacttcaccactgcccctgctatctgccacgacggcaaggctcacttccccagggaaggtgtcttcgtgagcaacggcacccactggttcgtcactcagagaaacttctacgagccacagatcatcaccactgacaacactttcgtgtctggaaactgcgacgtggtcatcggtatcgtcaacaacaccgtgtacgaccccctgcagccagagctggactcattcaaggaggaactggacaagtacttcaagaaccacacctcccctgacgtcgacctgggcgacatctcaggaatcaacgcttccgtcgtgaacatccagaaggagatcgaccgcctgaacgaagtggccaagaacctgaacgaaagcctgatcgacctgcaggagctgggcaagtacgaacagtacatcaagtggccttggtacatctggctgggtttcatcgctggcctcatcgctatcgtgatggtgaccatcatgctgtgctgcatgacttcatgctgctcctgcctgaagggctgctgcagctgcggatcttgctgcaagttcgacgaggacgactctgaacccgtcctgaagggcgtgaagctgcactacacccaccaccaccaccaccac

SEQ ID NO: 58 - protein, 1266 aa, synthetic construct
  REGION 1..1266: note = RECOMBINANT SPIKE PROTEIN
QCVNLTTRTQLPPAYTNSFTRGVYYPDKVFRSSVLHSTQDLFLPFFSNVTWFHAIHVSGTNGTKRFDNPVLPFNDGVYFASTEKSNIIRGWIFGTTLDSKTQSLLIVNNATNVVIKVCEFQFCNDPFLGVYYHKNNKSWMESEFRVYSSANNCTFEYVSQPFLMDLEGKQGNFKNLREFVFKNIDGYFKIYSKHTPINLVRDLPQGFSALEPLVDLPIGINITRFQTLLALHRSYLTPGDSSSGWTAGAAAYYVGYLQPRTFLLKYNENGTITDAVDCALDPLSETKCTLKSFTVEKGIYQTSNFRVQPTESIVRFPNITNLCPFGEVFNATRFASVYAWNRKRISNCVADYSVLYNSASFSTFKCYGVSPTKLNDLCFTNVYADSFVIRGDEVRQIAPGQTGKIADYNYKLPDDFTGCVIAWNSNNLDSKVGGNYNYLYRLFRKSNLKPFERDISTEIYQAGSTPCNGVEGFNCYFPLQSYGFQPTNGVGYQPYRVVVLSFELLHAPATVCGPKKSTNLVKNKCVNFNFNGLTGTGVLTESNKKFLPFQQFGRDIADTTDAVRDPQTLEILDITPCSFGGVSVITPGTNTSNQVAVLYQDVNCTEVPVAIHADQLTPTWRVYSTGSNVFQTRAGCLIGAEHVNNSYECDIPIGAGICASYQTQTNSPQQAQSVASQSIIAYTMSLGAENSVAYSNNSIAIPTNFTISVTTEILPVSMTKTSVDCTMYICGDSTECSNLLLQYGSFCTQLNRALTGIAVEQDKNTQEVFAQVKQIYKTPPIKDFGGFNFSQILPDPSKPSKRSFIEDLLFNKVTLADAGFIKQYGDCLGDIAARDLICAQKFNGLTVLPPLLTDEMIAQYTSALLAGTITSGWTFGAGAALQIPFAMQMAYRFNGIGVTQNVLYENQKLIANQFNSAIGKIQDSLSSTASALGKLQDVVNQNAQALNTLVKQLSSNFGAISSVLNDILSRLDKVEAEVQIDRLITGRLQSLQTYVTQQLIRAAEIRASANLAATKMSECVLGQSKRVDFCGKGYHLMSFPQSAPHGVVFLHVTYVPAQEKNFTTAPAICHDGKAHFPREGVFVSNGTHWFVTQRNFYEPQIITTDNTFVSGNCDVVIGIVNNTVYDPLQPELDSFKEELDKYFKNHTSPDVDLGDISGINASVVNIQKEIDRLNEVAKNLNESLIDLQELGKYEQYIKWPWYIWLGFIAGLIAIVMVTIMLCCMTSCCSCLKGCCSCGSCCKFDEDDSEPVLKGVKLHYTHHHHHH

SEQ ID NO: 59 - protein, 1219 aa, synthetic construct
  REGION 1..1219: note = RECOMBINANT SPIKE PROTEIN
MFVFLVLLPLVSSQCVNLTTRTQLPPAYTNSFTRGVYYPDKVFRSSVLHSTQDLFLPFFSNVTWFHAIHVSGTNGTKRFDNPVLPFNDGVYFASTEKSNIIRGWIFGTTLDSKTQSLLIVNNATNVVIKVCEFQFCNDPFLGVYYHKNNKSWMESEFRVYSSANNCTFEYVSQPFLMDLEGKQGNFKNLREFVFKNIDGYFKIYSKHTPINLVRDLPQGFSALEPLVDLPIGINITRFQTLLALHRSYLTPGDSSSGWTAGAAAYYVGYLQPRTFLLKYNENGTITDAVDCALDPLSETKCTLKSFTVEKGIYQTSNFRVQPTESIVRFPNITNLCPFGEVFNATRFASVYAWNRKRISNCVADYSVLYNSASFSTFKCYGVSPTKLNDLCFTNVYADSFVIRGDEVRQIAPGQTGKIADYNYKLPDDFTGCVIAWNSNNLDSKVGGNYNYLYRLFRKSNLKPFERDISTEIYQAGSTPCNGVEGFNCYFPLQSYGFQPTNGVGYQPYRVVVLSFELLHAPATVCGPKKSTNLVKNKCVNFNFNGLTGTGVLTESNKKFLPFQQFGRDIADTTDAVRDPQTLEILDITPCSFGGVSVITPGTNTSNQVAVLYQDVNCTEVPVAIHADQLTPTWRVYSTGSNVFQTRAGCLIGAEHVNNSYECDIPIGAGICASYQTQTNSPQQAQSVASQSIIAYTMSLGAENSVAYSNNSIAIPTNFTISVTTEILPVSMTKTSVDCTMYICGDSTECSNLLLQYGSFCTQLNRALTGIAVEQDKNTQEVFAQVKQIYKTPPIKDFGGFNFSQILPDPSKPSKRSFIEDLLFNKVTLADAGFIKQYGDCLGDIAARDLICAQKFNGLTVLPPLLTDEMIAQYTSALLAGTITSGWTFGAGAALQIPFAMQMAYRFNGIGVTQNVLYENQKLIANQFNSAIGKIQDSLSSTASALGKLQDVVNQNAQALNTLVKQLSSNFGAISSVLNDILSRLDKVEAEVQIDRLITGRLQSLQTYVTQQLIRAAEIRASANLAATKMSECVLGQSKRVDFCGKGYHLMSFPQSAPHGVVFLHVTYVPAQEKNFTTAPAICHDGKAHFPREGVFVSNGTHWFVTQRNFYEPQIITTDNTFVSGNCDVVIGIVNNTVYDPLQPELDSFKEELDKYFKNHTSPDVDLGDISGINASVVNIQKEIDRLNEVAKNLNESLIDLQELGKYEQYIKWPHHHHHH

SEQ ID NO: 60 - DNA, 3657 bp, synthetic construct
  misc_feature 1..3657: note = RECOMBINANT SPIKE PROTEIN
  source 1..3657: mol_type = other DNA
atgttcgtcttcctggtgctgctgcccctggtgtccagccagtgcgtgaacctgaccactaggactcagctgcctcccgcttacaccaactcattcactcgcggtgtgtactaccctgacaaggtcttccgttcttcagtgctgcactcaactcaggacctgttcctgcccttcttctccaacgtcacctggttccacgccatccacgtgtccggcaccaacggcactaagcgcttcgacaacccagtgctgcctttcaacgacggtgtctacttcgcttcaaccgagaagtccaacatcatccgtggatggatcttcggcaccactctggacagcaagactcagtctctgctgatcgtcaacaacgccaccaacgtggtcatcaaggtctgcgaattccagttctgcaacgacccattcctgggcgtctactaccacaagaacaacaagtcatggatggagtccgaattccgcgtctactccagcgctaacaactgcactttcgagtacgtgtcccagcctttcctgatggacctggaaggaaagcagggtaacttcaagaacctgagggagttcgtgttcaagaacatcgacggatacttcaagatttacagcaagcacaccccaatcaacctggtgcgcgacctgcctcagggtttctctgctctggagccactggtggacctgcctatcggcatcaacatcacccgcttccagactctgctggctctgcaccgttcctacctgactccaggcgactcatcttctggatggactgctggagctgctgcttactacgtgggctacctgcagcctcgcaccttcctgctgaagtacaacgaaaacggaaccatcactgacgccgtcgactgcgctctggaccctctgtcagaaaccaagtgcactctgaagtccttcaccgtggagaagggcatctaccagacttcaaacttcagggtgcagcccaccgaatccatcgtcagattccctaacatcactaacctgtgccccttcggagaggtcttcaacgccacccgcttcgcttccgtgtacgcctggaacaggaagagaatctcaaactgcgtcgctgactactccgtgctgtacaactcagcctccttcagcaccttcaagtgctacggcgtgtcaccaactaagctgaacgacctgtgcttcaccaacgtctacgccgactccttcgtgatcaggggagacgaggtcagacagatcgctcctggccagactggaaagatcgccgactacaactacaagctgcccgacgacttcaccggttgcgtcatcgcttggaacagcaacaacctggactctaaagtgggtggcaactacaactacctgtaccgcctgttccgtaagtcaaacctgaagccattcgagagggacatcagcactgaaatctaccaggccggatctaccccttgcaacggtgtcgagggcttcaactgctacttccccctgcagtcctacggtttccagccaactaacggtgtgggctaccagccttacagagtggtcgtgctgagcttcgaactgctccacgctcctgctactgtgtgcggtccaaagaagtctaccaacctggtcaagaacaagtgcgtgaacttcaacttcaacggcctgaccggaactggtgtcctgaccgagagcaacaagaagttcctgcccttccagcagttcggaagggacatcgctgacaccactgacgctgtgcgcgaccctcagaccctggaaatcctggacatcactccatgctcattcggaggtgtctccgtgatcacccctggcaccaacacttctaaccaggtcgctgtgctgtaccaggacgtcaactgcaccgaggtccctgtggccatccacgctgaccagctgacccccacttggcgcgtgtactccaccggcagcaacgtgttccagactcgtgctggttgcctgatcggcgccgagcacgtgaacaacagctacgaatgcgacatccccatcggcgctggaatctgcgcctcttaccagacccagactaacagcccacagcaggctcagtctgtggcctctcagtcaatcatcgcttacaccatgtcactgggcgctgaaaactccgtggcctactctaacaactcaatcgccatccccaccaacttcactatcagcgtgaccactgagatcctgccagtcagcatgaccaagacttctgtggactgcactatgtacatctgcggagacagcaccgaatgctctaacctgctgctgcagtacggctctttctgcacccagctgaaccgtgctctgactggaatcgccgtggagcaggacaagaacactcaggaagtcttcgctcaggtgaagcaaatctacaagaccccacctatcaaggacttcggcggattcaacttctcccagatcctgcctgacccctccaagccaagcaagcgctctttcatcgaggacctgctgttcaacaaggtcactctggccgacgctggattcatcaagcagtacggagactgcctgggtgacatcgccgctcgtgacctgatctgcgctcagaagttcaacggtctgaccgtgctgcccccactgctgactgacgaaatgatcgcccagtacactagcgccctgctggctggaaccatcacttctggttggaccttcggtgctggcgccgctctgcagatccctttcgctatgcagatggcctaccgtttcaacggaatcggtgtcacccagaacgtgctgtacgagaaccagaagctgatcgctaaccagttcaactcagccatcggaaagatccaggacagcctgagctctactgcctctgctctgggcaagctgcaggacgtcgtgaaccagaacgcccaggctctgaacaccctggtcaagcagctgtcatccaacttcggtgctatcagctctgtgctgaacgacatcctgtcccgcctggacaaggtcgaggccgaagtgcagatcgaccgcctgatcactggccgtctgcagtcactgcagacctacgtgactcagcagctgatcagggccgctgaaatcagagcctccgctaacctggccgctaccaagatgagcgagtgcgtcctgggtcaatctaagcgtgtggacttctgcggcaagggataccacctgatgtcattccctcagtctgctccccacggtgtggtgttcctgcacgtcacctacgtgccagcccaggagaagaacttcaccactgcccctgctatctgccacgacggcaaggctcacttccccagggaaggtgtcttcgtgagcaacggcacccactggttcgtcactcagagaaacttctacgagccacagatcatcaccactgacaacactttcgtgtctggaaactgcgacgtggtcatcggtatcgtcaacaacaccgtgtacgaccccctgcagccagagctggactcattcaaggaggaactggacaagtacttcaagaaccacacctcccctgacgtcgacctgggcgacatctcaggaatcaacgcttccgtcgtgaacatccagaaggagatcgaccgcctgaacgaagtggccaagaacctgaacgaaagcctgatcgacctgcaggagctgggcaagtacgaacagtacatcaagtggcctcaccaccaccaccaccac

SEQ ID NO: 61 - protein, 1205 aa, synthetic construct
  REGION 1..1205: note = RECOMBINANT SPIKE PROTEIN
CVNLTTRTQLPPAYTNSFTRGVYYPDKVFRSSVLHSTQDLFLPFFSNVTWFHAIHVSGTNGTKRFDNPVLPFNDGVYFASTEKSNIIRGWIFGTTLDSKTQSLLIVNNATNVVIKVCEFQFCNDPFLGVYYHKNNKSWMESEFRVYSSANNCTFEYVSQPFLMDLEGKQGNFKNLREFVFKNIDGYFKIYSKHTPINLVRDLPQGFSALEPLVDLPIGINITRFQTLLALHRSYLTPGDSSSGWTAGAAAYYVGYLQPRTFLLKYNENGTITDAVDCALDPLSETKCTLKSFTVEKGIYQTSNFRVQPTESIVRFPNITNLCPFGEVFNATRFASVYAWNRKRISNCVADYSVLYNSASFSTFKCYGVSPTKLNDLCFTNVYADSFVIRGDEVRQIAPGQTGKIADYNYKLPDDFTGCVIAWNSNNLDSKVGGNYNYLYRLFRKSNLKPFERDISTEIYQAGSTPCNGVEGFNCYFPLQSYGFQPTNGVGYQPYRVVVLSFELLHAPATVCGPKKSTNLVKNKCVNFNFNGLTGTGVLTESNKKFLPFQQFGRDIADTTDAVRDPQTLEILDITPCSFGGVSVITPGTNTSNQVAVLYQDVNCTEVPVAIHADQLTPTWRVYSTGSNVFQTRAGCLIGAEHVNNSYECDIPIGAGICASYQTQTNSPQQAQSVASQSIIAYTMSLGAENSVAYSNNSIAIPTNFTISVTTEILPVSMTKTSVDCTMYICGDSTECSNLLLQYGSFCTQLNRALTGIAVEQDKNTQEVFAQVKQIYKTPPIKDFGGFNFSQILPDPSKPSKRSFIEDLLFNKVTLADAGFIKQYGDCLGDIAARDLICAQKFNGLTVLPPLLTDEMIAQYTSALLAGTITSGWTFGAGAALQIPFAMQMAYRFNGIGVTQNVLYENQKLIANQFNSAIGKIQDSLSSTASALGKLQDVVNQNAQALNTLVKQLSSNFGAISSVLNDILSRLDKVEAEVQIDRLITGRLQSLQTYVTQQLIRAAEIRASANLAATKMSECVLGQSKRVDFCGKGYHLMSFPQSAPHGVVFLHVTYVPAQEKNFTTAPAICHDGKAHFPREGVFVSNGTHWFVTQRNFYEPQIITTDNTFVSGNCDVVIGIVNNTVYDPLQPELDSFKEELDKYFKNHTSPDVDLGDISGINASVVNIQKEIDRLNEVAKNLNESLIDLQELGKYEQYIKWPHHHHHH

SEQ ID NO: 62 - protein, 1263 aa, synthetic construct
  REGION 1..1263: note = RECOMBINANT SPIKE PROTEIN
MFVFLVLLPLVSSQCVNLTTRTQLPPAYTNSFTRGVYYPDKVFRSSVLHSTQDLFLPFFSNVTWFHAIHVSGTNGTKRFDNPVLPFNDGVYFASTEKSNIIRGWIFGTTLDSKTQSLLIVNNATNVVIKVCEFQFCNDPFLGVYYHKNNKSWMESEFRVYSSANNCTFEYVSQPFLMDLEGKQGNFKNLREFVFKNIDGYFKIYSKHTPINLVRDLPQGFSALEPLVDLPIGINITRFQTLLALHRSYLTPGDSSSGWTAGAAAYYVGYLQPRTFLLKYNENGTITDAVDCALDPLSETKCTLKSFTVEKGIYQTSNFRVQPTESIVRFPNITNLCPFGEVFNATRFASVYAWNRKRISNCVADYSVLYNSASFSTFKCYGVSPTKLNDLCFTNVYADSFVIRGDEVRQIAPGQTGKIADYNYKLPDDFTGCVIAWNSNNLDSKVGGNYNYLYRLFRKSNLKPFERDISTEIYQAGSTPCNGVEGFNCYFPLQSYGFQPTNGVGYQPYRVVVLSFELLHAPATVCGPKKSTNLVKNKCVNFNFNGLTGTGVLTESNKKFLPFQQFGRDIADTTDAVRDPQTLEILDITPCSFGGVSVITPGTNTSNQVAVLYQDVNCTEVPVAIHADQLTPTWRVYSTGSNVFQTRAGCLIGAEHVNNSYECDIPIGAGICASYQTQTNSPQQAQSVALGAENSVAYSNNSIAIPTNFTISVTTEILPVSMTKTSVDCTMYICGDSTECSNLLLQYGSFCTQLNRALTGIAVEQDKNTQEVFAQVKQIYKTPPIKDFGGFNFSQILPDPSKPSKRSFIEDLLFNKVTLADAGFIKQYGDCLGDIAARDLICAQKFNGLTVLPPLLTDEMIAQYTSALLAGTITSGWTFGAGAALQIPFAMQMAYRFNGIGVTQNVLYENQKLIANQFNSAIGKIQDSLSSTASALGKLQDVVNQNAQALNTLVKQLSSNFGAISSVLNDILSRLDKVEAEVQIDRLITGRLQSLQTYVTQQLIRAAEIRASANLAATKMSECVLGQSKRVDFCGKGYHLMSFPQSAPHGVVFLHVTYVPAQEKNFTTAPAICHDGKAHFPREGVFVSNGTHWFVTQRNFYEPQIITTDNTFVSGNCDVVIGIVNNTVYDPLQPELDSFKEELDKYFKNHTSPDVDLGDISGINASVVNIQKEIDRLNEVAKNLNESLIDLQELGKYEQYIKWPWYIWLGFIAGLIAIVMVTIMLCCMTSCCSCLKGCCSCGSCCKFDEDDSEPVLKGVKLHYT

SEQ ID NO: 63 - protein, 1250 aa, synthetic construct
  REGION 1..1250: note = RECOMBINANT SPIKE PROTEIN
QCVNLTTRTQLPPAYTNSFTRGVYYPDKVFRSSVLHSTQDLFLPFFSNVTWFHAIHVSGTNGTKRFDNPVLPFNDGVYFASTEKSNIIRGWIFGTTLDSKTQSLLIVNNATNVVIKVCEFQFCNDPFLGVYYHKNNKSWMESEFRVYSSANNCTFEYVSQPFLMDLEGKQGNFKNLREFVFKNIDGYFKIYSKHTPINLVRDLPQGFSALEPLVDLPIGINITRFQTLLALHRSYLTPGDSSSGWTAGAAAYYVGYLQPRTFLLKYNENGTITDAVDCALDPLSETKCTLKSFTVEKGIYQTSNFRVQPTESIVRFPNITNLCPFGEVFNATRFASVYAWNRKRISNCVADYSVLYNSASFSTFKCYGVSPTKLNDLCFTNVYADSFVIRGDEVRQIAPGQTGKIADYNYKLPDDFTGCVIAWNSNNLDSKVGGNYNYLYRLFRKSNLKPFERDISTEIYQAGSTPCNGVEGFNCYFPLQSYGFQPTNGVGYQPYRVVVLSFELLHAPATVCGPKKSTNLVKNKCVNFNFNGLTGTGVLTESNKKFLPFQQFGRDIADTTDAVRDPQTLEILDITPCSFGGVSVITPGTNTSNQVAVLYQDVNCTEVPVAIHADQLTPTWRVYSTGSNVFQTRAGCLIGAEHVNNSYECDIPIGAGICASYQTQTNSPQQAQSVALGAENSVAYSNNSIAIPTNFTISVTTEILPVSMTKTSVDCTMYICGDSTECSNLLLQYGSFCTQLNRALTGIAVEQDKNTQEVFAQVKQIYKTPPIKDFGGFNFSQILPDPSKPSKRSFIEDLLFNKVTLADAGFIKQYGDCLGDIAARDLICAQKFNGLTVLPPLLTDEMIAQYTSALLAGTITSGWTFGAGAALQIPFAMQMAYRFNGIGVTQNVLYENQKLIANQFNSAIGKIQDSLSSTASALGKLQDVVNQNAQALNTLVKQLSSNFGAISSVLNDILSRLDKVEAEVQIDRLITGRLQSLQTYVTQQLIRAAEIRASANLAATKMSECVLGQSKRVDFCGKGYHLMSFPQSAPHGVVFLHVTYVPAQEKNFTTAPAICHDGKAHFPREGVFVSNGTHWFVTQRNFYEPQIITTDNTFVSGNCDVVIGIVNNTVYDPLQPELDSFKEELDKYFKNHTSPDVDLGDISGINASVVNIQKEIDRLNEVAKNLNESLIDLQELGKYEQYIKWPWYIWLGFIAGLIAIVMVTIMLCCMTSCCSCLKGCCSCGSCCKFDEDDSEPVLKGVKLHYT

SEQ ID NO: 64 - protein, 1263 aa, synthetic construct
  REGION 1..1263: note = RECOMBINANT SPIKE PROTEIN
MFVFLVLLPLVSSQCVNLTTRTQLPPAYTNSFTRGVYYPDKVFRSSVLHSTQDLFLPFFSNVTWFHAIHVSGTNGTKRFDNPVLPFNDGVYFASTEKSNIIRGWIFGTTLDSKTQSLLIVNNATNVVIKVCEFQFCNDPFLGVYYHKNNKSWMESEFRVYSSANNCTFEYVSQPFLMDLEGKQGNFKNLREFVFKNIDGYFKIYSKHTPINLVRDLPQGFSALEPLVDLPIGINITRFQTLLALHRSYLTPGDSSSGWTAGAAAYYVGYLQPRTFLLKYNENGTITDAVDCALDPLSETKCTLKSFTVEKGIYQTSNFRVQPTESIVRFPNITNLCPFGEVFNATRFASVYAWNRKRISNCVADYSVLYNSASFSTFKCYGVSPTKLNDLCFTNVYADSFVIRGDEVRQIAPGQTGKIADYNYKLPDDFTGCVIAWNSNNLDSKVGGNYNYLYRLFRKSNLKPFERDISTEIYQAGSTPCNGVEGFNCYFPLQSYGFQPTNGVGYQPYRVVVLSFELLHAPATVCGPKKSTNLVKNKCVNFNFNGLTGTGVLTESNKKFLPFQQFGRDIADTTDAVRDPQTLEILDITPCSFGGVSVITPGTNTSNQVAVLYQDVNCTEVPVAIHADQLTPTWRVYSTGSNVFQTRAGCLIGAEHVNNSYECDIPIGAGICASYQTQTNSPQQAQSVASQSIIAYTMSLGAENSVAYSNNSIAIEILPVSMTKTSVDCTMYICGDSTECSNLLLQYGSFCTQLNRALTGIAVEQDKNTQEVFAQVKQIYKTPPIKDFGGFNFSQILPDPSKPSKRSFIEDLLFNKVTLADAGFIKQYGDCLGDIAARDLICAQKFNGLTVLPPLLTDEMIAQYTSALLAGTITSGWTFGAGAALQIPFAMQMAYRFNGIGVTQNVLYENQKLIANQFNSAIGKIQDSLSSTASALGKLQDVVNQNAQALNTLVKQLSSNFGAISSVLNDILSRLDKVEAEVQIDRLITGRLQSLQTYVTQQLIRAAEIRASANLAATKMSECVLGQSKRVDFCGKGYHLMSFPQSAPHGVVFLHVTYVPAQEKNFTTAPAICHDGKAHFPREGVFVSNGTHWFVTQRNFYEPQIITTDNTFVSGNCDVVIGIVNNTVYDPLQPELDSFKEELDKYFKNHTSPDVDLGDISGINASVVNIQKEIDRLNEVAKNLNESLIDLQELGKYEQYIKWPWYIWLGFIAGLIAIVMVTIMLCCMTSCCSCLKGCCSCGSCCKFDEDDSEPVLKGVKLHYT

SEQ ID NO: 65 - protein, 1250 aa, synthetic construct
  REGION 1..1250: note = RECOMBINANT SPIKE PROTEIN
QCVNLTTRTQLPPAYTNSFTRGVYYPDKVFRSSVLHSTQDLFLPFFSNVTWFHAIHVSGTNGTKRFDNPVLPFNDGVYFASTEKSNIIRGWIFGTTLDSKTQSLLIVNNATNVVIKVCEFQFCNDPFLGVYYHKNNKSWMESEFRVYSSANNCTFEYVSQPFLMDLEGKQGNFKNLREFVFKNIDGYFKIYSKHTPINLVRDLPQGFSALEPLVDLPIGINITRFQTLLALHRSYLTPGDSSSGWTAGAAAYYVGYLQPRTFLLKYNENGTITDAVDCALDPLSETKCTLKSFTVEKGIYQTSNFRVQPTESIVRFPNITNLCPFGEVFNATRFASVYAWNRKRISNCVADYSVLYNSASFSTFKCYGVSPTKLNDLCFTNVYADSFVIRGDEVRQIAPGQTGKIADYNYKLPDDFTGCVIAWNSNNLDSKVGGNYNYLYRLFRKSNLKPFERDISTEIYQAGSTPCNGVEGFNCYFPLQSYGFQPTNGVGYQPYRVVVLSFELLHAPATVCGPKKSTNLVKNKCVNFNFNGLTGTGVLTESNKKFLPFQQFGRDIADTTDAVRDPQTLEILDITPCSFGGVSVITPGTNTSNQVAVLYQDVNCTEVPVAIHADQLTPTWRVYSTGSNVFQTRAGCLIGAEHVNNSYECDIPIGAGICASYQTQTNSPQQAQSVASQSIIAYTMSLGAENSVAYSNNSIAIEILPVSMTKTSVDCTMYICGDSTECSNLLLQYGSFCTQLNRALTGIAVEQDKNTQEVFAQVKQIYKTPPIKDFGGFNFSQILPDPSKPSKRSFIEDLLFNKVTLADAGFIKQYGDCLGDIAARDLICAQKFNGLTVLPPLLTDEMIAQYTSALLAGTITSGWTFGAGAALQIPFAMQMAYRFNGIGVTQNVLYENQKLIANQFNSAIGKIQDSLSSTASALGKLQDVVNQNAQALNTLVKQLSSNFGAISSVLNDILSRLDKVEAEVQIDRLITGRLQSLQTYVTQQLIRAAEIRASANLAATKMSECVLGQSKRVDFCGKGYHLMSFPQSAPHGVVFLHVTYVPAQEKNFTTAPAICHDGKAHFPREGVFVSNGTHWFVTQRNFYEPQIITTDNTFVSGNCDVVIGIVNNTVYDPLQPELDSFKEELDKYFKNHTSPDVDLGDISGINASVVNIQKEIDRLNEVAKNLNESLIDLQELGKYEQYIKWPWYIWLGFIAGLIAIVMVTIMLCCMTSCCSCLKGCCSCGSCCKFDEDDSEPVLKGVKLHYT

SEQ ID NO: 66 - protein, 1263 aa, synthetic construct
  REGION 1..1263: note = RECOMBINANT SPIKE PROTEIN
MFVFLVLLPLVSSQCVNLTTRTQLPPAYTNSFTRGVYYPDKVFRSSVLHSTQDLFLPFFSNVTWFHAIHVSGTNGTKRFDNPVLPFNDGVYFASTEKSNIIRGWIFGTTLDSKTQSLLIVNNATNVVIKVCEFQFCNDPFLGVYYHKNNKSWMESEFRVYSSANNCTFEYVSQPFLMDLEGKQGNFKNLREFVFKNIDGYFKIYSKHTPINLVRDLPQGFSALEPLVDLPIGINITRFQTLLALHRSYLTPGDSSSGWTAGAAAYYVGYLQPRTFLLKYNENGTITDAVDCALDPLSETKCTLKSFTVEKGIYQTSNFRVQPTESIVRFPNITNLCPFGEVFNATRFASVYAWNRKRISNCVADYSVLYNSASFSTFKCYGVSPTKLNDLCFTNVYADSFVIRGDEVRQIAPGQTGKIADYNYKLPDDFTGCVIAWNSNNLDSKVGGNYNYLYRLFRKSNLKPFERDISTEIYQAGSTPCNGVEGFNCYFPLQSYGFQPTNGVGYQPYRVVVLSFELLHAPATVCGPKKSTNLVKNKCVNFNFNGLTGTGVLTESNKKFLPFQQFGRDIADTTDAVRDPQTLEILDITPCSFGGVSVITPGTNTSNQVAVLYQDVNCTEVPVAIHADQLTPTWRVYSTGSNVFQTRAGCLIGAEHVNNSYECDIPIGAGICASYQTQTNSPQQAQSVASQSIIAYTMSLGAENSVAYSNNSIAIPTNFTISVTTEILPVSMTKTSVDCTMYICGDSTECSNLLLQYGSFCTQLNRALTGIAVEQDKNTQEVFAQVKQIYKTPPIKDFGGFNFSQILPDPSKPSKRSFIADAGFIKQYGDCLGDIAARDLICAQKFNGLTVLPPLLTDEMIAQYTSALLAGTITSGWTFGAGAALQIPFAMQMAYRFNGIGVTQNVLYENQKLIANQFNSAIGKIQDSLSSTASALGKLQDVVNQNAQALNTLVKQLSSNFGAISSVLNDILSRLDKVEAEVQIDRLITGRLQSLQTYVTQQLIRAAEIRASANLAATKMSECVLGQSKRVDFCGKGYHLMSFPQSAPHGVVFLHVTYVPAQEKNFTTAPAICHDGKAHFPREGVFVSNGTHWFVTQRNFYEPQIITTDNTFVSGNCDVVIGIVNNTVYDPLQPELDSFKEELDKYFKNHTSPDVDLGDISGINASVVNIQKEIDRLNEVAKNLNESLIDLQELGKYEQYIKWPWYIWLGFIAGLIAIVMVTIMLCCMTSCCSCLKGCCSCGSCCKFDEDDSEPVLKGVKLHYT

SEQ ID NO: 67 - protein, 1250 aa, synthetic construct
  REGION 1..1250: note = RECOMBINANT SPIKE PROTEIN
QCVNLTTRTQLPPAYTNSFTRGVYYPDKVFRSSVLHSTQDLFLPFFSNVTWFHAIHVSGTNGTKRFDNPVLPFNDGVYFASTEKSNIIRGWIFGTTLDSKTQSLLIVNNATNVVIKVCEFQFCNDPFLGVYYHKNNKSWMESEFRVYSSANNCTFEYVSQPFLMDLEGKQGNFKNLREFVFKNIDGYFKIYSKHTPINLVRDLPQGFSALEPLVDLPIGINITRFQTLLALHRSYLTPGDSSSGWTAGAAAYYVGYLQPRTFLLKYNENGTITDAVDCALDPLSETKCTLKSFTVEKGIYQTSNFRVQPTESIVRFPNITNLCPFGEVFNATRFASVYAWNRKRISNCVADYSVLYNSASFSTFKCYGVSPTKLNDLCFTNVYADSFVIRGDEVRQIAPGQTGKIADYNYKLPDDFTGCVIAWNSNNLDSKVGGNYNYLYRLFRKSNLKPFERDISTEIYQAGSTPCNGVEGFNCYFPLQSYGFQPTNGVGYQPYRVVVLSFELLHAPATVCGPKKSTNLVKNKCVNFNFNGLTGTGVLTESNKKFLPFQQFGRDIADTTDAVRDPQTLEILDITPCSFGGVSVITPGTNTSNQVAVLYQDVNCTEVPVAIHADQLTPTWRVYSTGSNVFQTRAGCLIGAEHVNNSYECDIPIGAGICASYQTQTNSPQQAQSVASQSIIAYTMSLGAENSVAYSNNSIAIPTNFTISVTTEILPVSMTKTSVDCTMYICGDSTECSNLLLQYGSFCTQLNRALTGIAVEQDKNTQEVFAQVKQIYKTPPIKDFGGFNFSQILPDPSKPSKRSFIADAGFIKQYGDCLGDIAARDLICAQKFNGLTVLPPLLTDEMIAQYTSALLAGTITSGWTFGAGAALQIPFAMQMAYRFNGIGVTQNVLYENQKLIANQFNSAIGKIQDSLSSTASALGKLQDVVNQNAQALNTLVKQLSSNFGAISSVLNDILSRLDKVEAEVQIDRLITGRLQSLQTYVTQQLIRAAEIRASANLAATKMSECVLGQSKRVDFCGKGYHLMSFPQSAPHGVVFLHVTYVPAQEKNFTTAPAICHDGKAHFPREGVFVSNGTHWFVTQRNFYEPQIITTDNTFVSGNCDVVIGIVNNTVYDPLQPELDSFKEELDKYFKNHTSPDVDLGDISGINASVVNIQKEIDRLNEVAKNLNESLIDLQELGKYEQYIKWPWYIWLGFIAGLIAIVMVTIMLCCMTSCCSCLKGCCSCGSCCKFDEDDSEPVLKGVKLHYT

SEQ ID NO: 68 - protein, 31 aa, synthetic construct
  REGION 1..31: note = Foldon
SAIGGYIPEAPRDGQAYVRKDGEWVLLSTFL

SEQ ID NO: 69 - protein, 202 aa, Severe acute respiratory syndrome-related coronavirus
RFPNITNLCPFGEVFNATRFASVYAWNRKRISNCVADYSVLYNSASFSTFKCYGVSPTKLNDLCFTNVYADSFVIRGDEVRQIAPGQTGKIADYNYKLPDDFTGCVIAWNSNNLDSKVGGNYNYLYRLFRKSNLKPFERDISTEIYQAGSTPCNGVEGFNCYFPLQSYGFQPTNGVGYQPYRVVVLSFELLHAPATVCGPKK

SEQ ID NO: 70 - protein, 201 aa, Severe acute respiratory syndrome-related coronavirus
RFPNITNLCPFGEVFNATKFPSVYAWERKKISNCVADYSVLYNSTFFSTFKCYGVSATKLNDLCFSNVYADSFVVKGDDVRQIAPGQTGVIADYNYKLPDDFMGCVLAWNTRNIDATSTGNYNYKYRYLRHGKLRPFERDISNVPFSPDGKPCTPPALNCYWPLNDYGFYTTTGIGYQPYRVVVLSFELLNAPATVCGPKL

SEQ ID NO: 71 - protein, 239 aa, Severe acute respiratory syndrome-related coronavirus
FEAKPSGSVVAEGVECDFSPLLSGTPPQVYNFKRLVFTNCNYNLTKLLSLFSVNDFTCSQISPAAIASNCYSSLILDYFSYPLSMKSDLSVSSAGPISQFNYKQSFSNPTCLILATVPHNLTTITKPLKYSYINKCSRLLSDDRTEVPQLVNANQYSPCVSIVPSTVWEDGDYYRKQLSPLEGGGWLVASGSTVAMTEQLQMGFGITVQYGTDTNSVCPKLEFANDTKIASQLGNCVEY

SEQ ID NO: 72 - protein, 544 aa, synthetic construct
  REGION 1..544: note = RECOMBINANT SPIKE PROTEIN
MFVFLVLLPLVSSRFPNITNLCPFGEVFNATRFASVYAWNRKRISNCVADYSVLYNSASFSTFKCYGVSPTKLNDLCFTNVYADSFVIRGDEVRQIAPGQTGKIADYNYKLPDDFTGCVIAWNSNNLDSKVGGNYNYLYRLFRKSNLKPFERDISTEIYQAGSTPCNGVEGFNCYFPLQSYGFQPTNGVGYQPYRVVVLSFELLHAPATVCGPKKSTNLVKNKCVNFNFNGLTGTGVLTESNKKFLPFQQFGRDIADTTDAVRDPQTLEILDITPCSFGGVSVITPGTNTSNQVAVLYQDVNCTERFPNITNLCPFGEVFNATRFASVYAWNRKRISNCVADYSVLYNSASFSTFKCYGVSPTKLNDLCFTNVYADSFVIRGDEVRQIAPGQTGKIADYNYKLPDDFTGCVIAWNSNNLDSKVGGNYNYLYRLFRKSNLKPFERDISTEIYQAGSTPCNGVEGFNCYFPLQSYGFQPTNGVGYQPYRVVVLSFELLHAPATVCGPKKSAIGGYIPEAPRDGQAYVRKDGEWVLLSTFLHHHHHH

SEQ ID NO: 73 - protein, 531 aa, synthetic construct
  REGION 1..531: note = RECOMBINANT SPIKE PROTEIN
RFPNITNLCPFGEVFNATRFASVYAWNRKRISNCVADYSVLYNSASFSTFKCYGVSPTKLNDLCFTNVYADSFVIRGDEVRQIAPGQTGKIADYNYKLPDDFTGCVIAWNSNNLDSKVGGNYNYLYRLFRKSNLKPFERDISTEIYQAGSTPCNGVEGFNCYFPLQSYGFQPTNGVGYQPYRVVVLSFELLHAPATVCGPKKSTNLVKNKCVNFNFNGLTGTGVLTESNKKFLPFQQFGRDIADTTDAVRDPQTLEILDITPCSFGGVSVITPGTNTSNQVAVLYQDVNCTERFPNITNLCPFGEVFNATRFASVYAWNRKRISNCVADYSVLYNSASFSTFKCYGVSPTKLNDLCFTNVYADSFVIRGDEVRQIAPGQTGKIADYNYKLPDDFTGCVIAWNSNNLDSKVGGNYNYLYRLFRKSNLKPFERDISTEIYQAGSTPCNGVEGFNCYFPLQSYGFQPTNGVGYQPYRVVVLSFELLHAPATVCGPKKSAIGGYIPEAPRDGQAYVRKDGEWVLLSTFLHHHHHH

SEQ ID NO: 74 - protein, 544 aa, synthetic construct; identical to SEQ ID NO: 72
  REGION 1..544: note = RECOMBINANT SPIKE PROTEIN

SEQ ID NO: 75 - protein, 531 aa, synthetic construct; identical to SEQ ID NO: 73
  REGION 1..531: note = RECOMBINANT SPIKE PROTEIN

SEQ ID NO: 76 - protein, 470 aa, synthetic construct
  REGION 1..470: note = RECOMBINANT SPIKE PROTEIN
MFVFLVLLPLVSSRFPNITNLCPFGEVFNATRFASVYAWNRKRISNCVADYSVLYNSASFSTFKCYGVSPTKLNDLCFTNVYADSFVIRGDEVRQIAPGQTGKIADYNYKLPDDFTGCVIAWNSNNLDSKVGGNYNYLYRLFRKSNLKPFERDISTEIYQAGSTPCNGVEGFNCYFPLQSYGFQPTNGVGYQPYRVVVLSFELLHAPATVCGPKKSGGGSGGGSGGGSGGGSRFPNITNLCPFGEVFNATKFPSVYAWERKKISNCVADYSVLYNSTFFSTFKCYGVSATKLNDLCFSNVYADSFVVKGDDVRQIAPGQTGVIADYNYKLPDDFMGCVLAWNTRNIDATSTGNYNYKYRYLRHGKLRPFERDISNVPFSPDGKPCTPPALNCYWPLNDYGFYTTTGIGYQPYRVVVLSFELLNAPATVCGPKLSAIGGYIPEAPRDGQAYVRKDGEWVLLSTFLHHHHHH

SEQ ID NO: 77 - protein, 464 aa, synthetic construct
  REGION 1..464: note = RECOMBINANT SPIKE PROTEIN
MFVFLVLLPLVSSRFPNITNLCPFGEVFNATRFASVYAWNRKRISNCVADYSVLYNSASFSTFKCYGVSPTKLNDLCFTNVYADSFVIRGDEVRQIAPGQTGKIADYNYKLPDDFTGCVIAWNSNNLDSKVGGNYNYLYRLFRKSNLKPFERDISTEIYQAGSTPCNGVEGFNCYFPLQSYGFQPTNGVGYQPYRVVVLSFELLHAPATVCGPKKSGGGSGGGSGGGSGGGSRFPNITNLCPFGEVFNATKFPSVYAWERKKISNCVADYSVLYNSTFFSTFKCYGVSATKLNDLCFSNVYADSFVVKGDDVRQIAPGQTGVIADYNYKLPDDFMGCVLAWNTRNIDATSTGNYNYKYRYLRHGKLRPFERDISNVPFSPDGKPCTPPALNCYWPLNDYGFYTTTGIGYQPYRVVVLSFELLNAPATVCGPKLSAIGGYIPEAPRDGQAYVRKDGEWVLLSTFL

SEQ ID NO: 78 - protein, 457 aa, synthetic construct
  REGION 1..457: note = RECOMBINANT SPIKE PROTEIN
RFPNITNLCPFGEVFNATRFASVYAWNRKRISNCVADYSVLYNSASFSTFKCYGVSPTKLNDLCFTNVYADSFVIRGDEVRQIAPGQTGKIADYNYKLPDDFTGCVIAWNSNNLDSKVGGNYNYLYRLFRKSNLKPFERDISTEIYQAGSTPCNGVEGFNCYFPLQSYGFQPTNGVGYQPYRVVVLSFELLHAPATVCGPKKSGGGSGGGSGGGSGGGSRFPNITNLCPFGEVFNATKFPSVYAWERKKISNCVADYSVLYNSTFFSTFKCYGVSATKLNDLCFSNVYADSFVVKGDDVRQIAPGQTGVIADYNYKLPDDFMGCVLAWNTRNIDATSTGNYNYKYRYLRHGKLRPFERDISNVPFSPDGKPCTPPALNCYWPLNDYGFYTTTGIGYQPYRVVVLSFELLNAPATVCGPKLSAIGGYIPEAPRDGQAYVRKDGEWVLLSTFLHHHHHH

SEQ ID NO: 79 - protein, 451 aa, synthetic construct
  REGION 1..451: note = RECOMBINANT SPIKE PROTEIN
RFPNITNLCPFGEVFNATRFASVYAWNRKRISNCVADYSVLYNSASFSTFKCYGVSPTKLNDLCFTNVYADSFVIRGDEVRQIAPGQTGKIADYNYKLPDDFTGCVIAWNSNNLDSKVGGNYNYLYRLFRKSNLKPFERDISTEIYQAGSTPCNGVEGFNCYFPLQSYGFQPTNGVGYQPYRVVVLSFELLHAPATVCGPKKSGGGSGGGSGGGSGGGSRFPNITNLCPFGEVFNATKFPSVYAWERKKISNCVADYSVLYNSTFFSTFKCYGVSATKLNDLCFSNVYADSFVVKGDDVRQIAPGQTGVIADYNYKLPDDFMGCVLAWNTRNIDATSTGNYNYKYRYLRHGKLRPFERDISNVPFSPDGKPCTPPALNCYWPLNDYGFYTTTGIGYQPYRVVVLSFELLNAPATVCGPKLSAIGGYIPEAPRDGQAYVRKDGEWVLLSTFL

SEQ ID NO: 80 - protein, 726 aa, synthetic construct
  REGION 1..726: note = RECOMBINANT SPIKE PROTEIN
MFVFLVLLPLVSSRFPNITNLCPFGEVFNATRFASVYAWNRKRISNCVADYSVLYNSASFSTFKCYGVSPTKLNDLCFTNVYADSFVIRGDEVRQIAPGQTGKIADYNYKLPDDFTGCVIAWNSNNLDSKVGGNYNYLYRLFRKSNLKPFERDISTEIYQAGSTPCNGVEGFNCYFPLQSYGFQPTNGVGYQPYRVVVLSFELLHAPATVCGPKKSGGGSGGGSGGGSGGGSFEAKPSGSVVAEGVECDFSPLLSGTPPQVYNFKRLVFTNCNYNLTKLLSLFSVNDFTCSQISPAAIASNCYSSLILDYFSYPLSMKSDLSVSSAGPISQFNYKQSFSNPTCLILATVPHNLTTITKPLKYSYINKCSRLLSDDRTEVPQLVNANQYSPCVSIVPSTVWEDGDYYRKQLSPLEGGGWLVASGSTVAMTEQLQMGFGITVQYGTDTNSVCPKLEFANDTKIASQLGNCVEYSGGGSGGGSGGGSGGGSRFPNITNLCPFGEVFNATKFPSVYAWERKKISNCVADYSVLYNSTFFSTFKCYGVSATKLNDLCFSNVYADSFVVKGDDVRQIAPGQTGVIADYNYKLPDDFMGCVLAWNTRNIDATSTGNYNYKYRYLRHGKLRPFERDISNVPFSPDGKPCTPPALNCYWPLNDYGFYTTTGIGYQPYRVVVLSFELLNAPATVCGPKLSAIGGYIPEAPRDGQAYVRKDGEWVLLSTFLHHHHHH

SEQ ID NO: 81 - protein, 720 aa, synthetic construct
  REGION 1..720: note = RECOMBINANT SPIKE PROTEIN
MFVFLVLLPLVSSRFPNITNLCPFGEVFNATRFASVYAWNRKRISNCVADYSVLYNSASFSTFKCYGVSPTKLNDLCFTNVYADSFVIRGDEVRQIAPGQTGKIADYNYKLPDDFTGCVIAWNSNNLDSKVGGNYNYLYRLFRKSNLKPFERDISTEIYQAGSTPCNGVEGFNCYFPLQSYGFQPTNGVGYQPYRVVVLSFELLHAPATVCGPKKSGGGSGGGSGGGSGGGSFEAKPSGSVVAEGVECDFSPLLSGTPPQVYNFKRLVFTNCNYNLTKLLSLFSVNDFTCSQISPAAIASNCYSSLILDYFSYPLSMKSDLSVSSAGPISQFNYKQSFSNPTCLILATVPHNLTTITKPLKYSYINKCSRLLSDDRTEVPQLVNANQYSPCVSIVPSTVWEDGDYYRKQLSPLEGGGWLVASGSTVAMTEQLQMGFGITVQYGTDTNSVCPKLEFANDTKIASQLGNCVEYSGGGSGGGSGGGSGGGSRFPNITNLCPFGEVFNATKFPSVYAWERKKISNCVADYSVLYNSTFFSTFKCYGVSATKLNDLCFSNVYADSFVVKGDDVRQIAPGQTGVIADYNYKLPDDFMGCVLAWNTRNIDATSTGNYNYKYRYLRHGKLRPFERDISNVPFSPDGKPCTPPALNCYWPLNDYGFYTTTGIGYQPYRVVVLSFELLNAPATVCGPKLSAIGGYIPEAPRDGQAYVRKDGEWVLLSTFL

SEQ ID NO: 82 - protein, 713 aa, synthetic construct
  REGION 1..713: note = RECOMBINANT SPIKE PROTEIN
RFPNITNLCPFGEVFNATRFASVYAWNRKRISNCVADYSVLYNSASFSTFKCYGVSPTKLNDLCFTNVYADSFVIRGDEVRQIAPGQTGKIADYNYKLPDDFTGCVIAWNSNNLDSKVGGNYNYLYRLFRKSNLKPFERDISTEIYQAGSTPCNGVEGFNCYFPLQSYGFQPTNGVGYQPYRVVVLSFELLHAPATVCGPKKSGGGSGGGSGGGSGGGSFEAKPSGSVVAEGVECDFSPLLSGTPPQVYNFKRLVFTNCNYNLTKLLSLFSVNDFTCSQISPAAIASNCYSSLILDYFSYPLSMKSDLSVSSAGPISQFNYKQSFSNPTCLILATVPHNLTTITKPLKYSYINKCSRLLSDDRTEVPQLVNANQYSPCVSIVPSTVWEDGDYYRKQLSPLEGGGWLVASGSTVAMTEQLQMGFGITVQYGTDTNSVCPKLEFANDTKIASQLGNCVEYSGGGSGGGSGGGSGGGSRFPNITNLCPFGEVFNATKFPSVYAWERKKISNCVADYSVLYNSTFFSTFKCYGVSATKLNDLCFSNVYADSFVVKGDDVRQIAPGQTGVIADYNYKLPDDFMGCVLAWNTRNIDATSTGNYNYKYRYLRHGKLRPFERDISNVPFSPDGKPCTPPALNCYWPLNDYGFYTTTGIGYQPYRVVVLSFELLNAPATVCGPKLSAIGGYIPEAPRDGQAYVRKDGEWVLLSTFLHHHHHH

SEQ ID NO: 83 - protein, 707 aa, synthetic construct
  REGION 1..707: note = RECOMBINANT SPIKE PROTEIN
RFPNITNLCPFGEVFNATRFASVYAWNRKRISNCVADYSVLYNSASFSTFKCYGVSPTKLNDLCFTNVYADSFVIRGDEVRQIAPGQTGKIADYNYKLPDDFTGCVIAWNSNNLDSKVGGNYNYLYRLFRKSNLKPFERDISTEIYQAGSTPCNGVEGFNCYFPLQSYGFQPTNGVGYQPYRVVVLSFELLHAPATVCGPKKSGGGSGGGSGGGSGGGSFEAKPSGSVVAEGVECDFSPLLSGTPPQVYNFKRLVFTNCNYNLTKLLSLFSVNDFTCSQISPAAIASNCYSSLILDYFSYPLSMKSDLSVSSAGPISQFNYKQSFSNPTCLILATVPHNLTTITKPLKYSYINKCSRLLSDDRTEVPQLVNANQYSPCVSIVPSTVWEDGDYYRKQLSPLEGGGWLVASGSTVAMTEQLQMGFGITVQYGTDTNSVCPKLEFANDTKIASQLGNCVEYSGGGSGGGSGGGSGGGSRFPNITNLCPFGEVFNATKFPSVYAWERKKISNCVADYSVLYNSTFFSTFKCYGVSATKLNDLCFSNVYADSFVVKGDDVRQIAPGQTGVIADYNYKLPDDFMGCVLAWNTRNIDATSTGNYNYKYRYLRHGKLRPFERDISNVPFSPDGKPCTPPALNCYWPLNDYGFYTTTGIGYQPYRVVVLSFELLNAPATVCGPKLSAIGGYIPEAPRDGQAYVRKDGEWVLLSTFL

SEQ ID NO: 84 - protein, 1273 aa, synthetic construct
  REGION 1..1273: note = RECOMBINANT SPIKE PROTEIN
MFVFLVLLPLVSSQCVNLTTRTQLPPAYTNSFTRGVYYPDKVFRSSVLHSTQDLFLPFFSNVTWFHAIHVSGTNGTKRFDNPVLPFNDGVYFASTEKSNIIRGWIFGTTLDSKTQSLLIVNNATNVVIKVCEFQFCNDPFLGVYYHKNNKSWMESEFRVYSSANNCTFEYVSQPFLMDLEGKQGNFKNLREFVFKNIDGYFKIYSKHTPINLVRDLPQGFSALEPLVDLPIGINITRFQTLLALHRSYLTPGDSSSGWTAGAAAYYVGYLQPRTFLLKYNENGTITDAVDCALDPLSETKCTLKSFTVEKGIYQTSNFRVQPTESIVRFPNITNLCPFGEVFNATRFASVYAWNRKRISNCVADYSVLYNSASFSTFKCYGVSPTKLNDLCFTNVYADSFVIRGDEVRQIAPGQTGKIADYNYKLPDDFTGCVIAWNSNNLDSKVGGNYNYLYRLFRKSNLKPFERDISTEIYQAGSTPCNGVEGFNCYFPLQSYGFQPTNGVGYQPYRVVVLSFELLHAPATVCGPKKSTNLVKNKCVNFNFNGLTGTGVLTESNKKFLPFQQFGRDIADTTDAVRDPQTLEILDITPCSFGGVSVITPGTNTSNQVAVLYQDVNCTEVPVAIHADQLTPTWRVYSTGSNVFQTRAGCLIGAEHVNNSYECDIPIGAGICASYQTQTNSPRRARSVASQSIIAYTMSLGAENSVAYSNNSIAIPTNFTISVTTEILPVSMTKTSVDCTMYICGDSTECSNLLLQYGSFCTQLNRALTGIAVEQDKNTQEVFAQVKQIYKTPPIKDFGGFNFSQILPDPSKPSKRSFIEDLLFNKVTLADAGFIKQYGDCLGDIAARDLICAQKFNGLTVLPPLLTDEMIAQYTSALLAGTITSGWTFGAGAALQIPFAMQMAYRFNGIGVTQNVLYENQKLIANQFNSAIGKIQDSLSSTASALGKLQDVVNQNAQALNTLVKQLSSNFGAISSVLNDILSRLDPPEAEVQIDRLITGRLQSLQTYVTQQLIRAAEIRASANLAATKMSECVLGQSKRVDFCGKGYHLMSFPQSAPHGVVFLHVTYVPAQEKNFTTAPAICHDGKAHFPREGVFVSNGTHWFVTQRNFYEPQIITTDNTFVSGNCDVVIGIVNNTVYDPLQPELDSFKEELDKYFKNHTSPDVDLGDISGINASVVNIQKEIDRLNEVAKNLNESLIDLQELGKYEQYIKWPWYIWLGFIAGLIAIVMVTIMLCCMTSCCSCLKGCCSCGSCCKFDEDDSEPVLKGVKLHYT

SEQ ID NO: 85 - protein, 1260 aa, synthetic construct
  REGION 1..1260: note = RECOMBINANT SPIKE PROTEIN
QCVNLTTRTQLPPAYTNSFTRGVYYPDKVFRSSVLHSTQDLFLPFFSNVTWFHAIHVSGTNGTKRFDNPVLPFNDGVYFASTEKSNIIRGWIFGTTLDSKTQSLLIVNNATNVVIKVCEFQFCNDPFLGVYYHKNNKSWMESEFRVYSSANNCTFEYVSQPFLMDLEGKQGNFKNLREFVFKNIDGYFKIYSKHTPINLVRDLPQGFSALEPLVDLPIGINITRFQTLLALHRSYLTPGDSSSGWTAGAAAYYVGYLQPRTFLLKYNENGTITDAVDCALDPLSETKCTLKSFTVEKGIYQTSNFRVQPTESIVRFPNITNLCPFGEVFNATRFASVYAWNRKRISNCVADYSVLYNSASFSTFKCYGVSPTKLNDLCFTNVYADSFVIRGDEVRQIAPGQTGKIADYNYKLPDDFTGCVIAWNSNNLDSKVGGNYNYLYRLFRKSNLKPFERDISTEIYQAGSTPCNGVEGFNCYFPLQSYGFQPTNGVGYQPYRVVVLSFELLHAPATVCGPKKSTNLVKNKCVNFNFNGLTGTGVLTESNKKFLPFQQFGRDIADTTDAVRDPQTLEILDITPCSFGGVSVITPGTNTSNQVAVLYQDVNCTEVPVAIHADQLTPTWRVYSTGSNVFQTRAGCLIGAEHVNNSYECDIPIGAGICASYQTQTNSPRRARSVASQSIIAYTMSLGAENSVAYSNNSIAIPTNFTISVTTEILPVSMTKTSVDCTMYICGDSTECSNLLLQYGSFCTQLNRALTGIAVEQDKNTQEVFAQVKQIYKTPPIKDFGGFNFSQILPDPSKPSKRSFIEDLLFNKVTLADAGFIKQYGDCLGDIAARDLICAQKFNGLTVLPPLLTDEMIAQYTSALLAGTITSGWTFGAGAALQIPFAMQMAYRFNGIGVTQNVLYENQKLIANQFNSAIGKIQDSLSSTASALGKLQDVVNQNAQALNTLVKQLSSNFGAISSVLNDILSRLDPPEAEVQIDRLITGRLQSLQTYVTQQLIRAAEIRASANLAATKMSECVLGQSKRVDFCGKGYHLMSFPQSAPHGVVFLHVTYVPAQEKNFTTAPAICHDGKAHFPREGVFVSNGTHWFVTQRNFYEPQIITTDNTFVSGNCDVVIGIVNNTVYDPLQPELDSFKEELDKYFKNHTSPDVDLGDISGINASVVNIQKEIDRLNEVAKNLNESLIDLQELGKYEQYIKWPWYIWLGFIAGLIAIVMVTIMLCCMTSCCSCLKGCCSCGSCCKFDEDDSEPVLKGVKLHYT

SEQ ID NO: 86 - protein, 1273 aa, synthetic construct
  REGION 1..1273: note = RECOMBINANT SPIKE PROTEIN
MFVFLVLLPLVSSQCVNLTTRTQLPPAYTNSFTRGVYYPDKVFRSSVLHSTQDLFLPFFSNVTWFHAIHVSGTNGTKRFDNPVLPFNDGVYFASTEKSNIIRGWIFGTTLDSKTQSLLIVNNATNVVIKVCEFQFCNDPFLGVYYHKNNKSWMESEFRVYSSANNCTFEYVSQPFLMDLEGKQGNFKNLREFVFKNIDGYFKIYSKHTPINLVRDLPQGFSALEPLVDLPIGINITRFQTLLALHRSYLTPGDSSSGWTAGAAAYYVGYLQPRTFLLKYNENGTITDAVDCALDPLSETKCTLKSFTVEKGIYQTSNFRVQPTESIVRFPNITNLCPFGEVFNATRFASVYAWNRKRISNCVADYSVLYNSASFSTFKCYGVSPTKLNDLCFTNVYADSFVIRGDEVRQIAPGQTGKIADYNYKLPDDFTGCVIAWNSNNLDSKVGGNYNYLYRLFRKSNLKPFERDISTEIYQAGSTPCNGVEGFNCYFPLQSYGFQPTNGVGYQPYRVVVLSFELLHAPATVCGPKKSTNLVKNKCVNFNFNGLTGTGVLTESNKKFLPFQQFGRDIADTTDAVRDPQTLEILDITPCSFGGVSVITPGTNTSNQVAVLYQDVNCTEVPVAIHADQLTPTWRVYSTGSNVFQTRAGCLIGAEHVNNSYECDIPIGAGICASYQTQTNSPQQAQSVASQSIIAYTMSLGAENSVAYSNNSIAIPTNFTISVTTEILPVSMTKTSVDCTMYICGDSTECSNLLLQYGSFCTQLNRALTGIAVEQDKNTQEVFAQVKQIYKTPPIKDFGGFNFSQILPDPSKPSKRSFIEDLLFNKVTLADAGFIKQYGDCLGDIAARDLICAQKFNGLTVLPPLLTDEMIAQYTSALLAGTITSGWTFGAGAALQIPFAMQMAYRFNGIGVTQNVLYENQKLIANQFNSAIGKIQDSLSSTASALGKLQDVVNQNAQALNTLVKQLSSNFGAISSVLNDILSRLDPPEAEVQIDRLITGRLQSLQTYVTQQLIRAAEIRASANLAATKMSECVLGQSKRVDFCGKGYHLMSFPQSAPHGVVFLHVTYVPAQEKNFTTAPAICHDGKAHFPREGVFVSNGTHWFVTQRNFYEPQIITTDNTFVSGNCDVVIGIVNNTVYDPLQPELDSFKEELDKYFKNHTSPDVDLGDISGINASVVNIQKEIDRLNEVAKNLNESLIDLQELGKYEQYIKWPWYIWLGFIAGLIAIVMVTIMLCCMTSCCSCLKGCCSCGSCCKFDEDDSEPVLKGVKLHYT

SEQ ID NO: 87 - protein, 1260 aa, synthetic construct
  REGION 1..1260: note = RECOMBINANT SPIKE PROTEIN
QCVNLTTRTQLPPAYTNSFTRGVYYPDKVFRSSVLHSTQDLFLPFFSNVTWFHAIHVSGTNGTKRFDNPVLPFNDGVYFASTEKSNIIRGWIFGTTLDSKTQSLLIVNNATNVVIKVCEFQFCNDPFLGVYYHKNNKSWMESEFRVYSSANNCTFEYVSQPFLMDLEGKQGNFKNLREFVFKNIDGYFKIYSKHTPINLVRDLPQGFSALEPLVDLPIGINITRFQTLLALHRSYLTPGDSSSGWTAGAAAYYVGYLQPRTFLLKYNENGTITDAVDCALDPLSETKCTLKSFTVEKGIYQTSNFRVQPTESIVRFPNITNLCPFGEVFNATRFASVYAWNRKRISNCVADYSVLYNSASFSTFKCYGVSPTKLNDLCFTNVYADSFVIRGDEVRQIAPGQTGKIADYNYKLPDDFTGCVIAWNSNNLDSKVGGNYNYLYRLFRKSNLKPFERDISTEIYQAGSTPCNGVEGFNCYFPLQSYGFQPTNGVGYQPYRVVVLSFELLHAPATVCGPKKSTNLVKNKCVNFNFNGLTGTGVLTESNKKFLPFQQFGRDIADTTDAVRDPQTLEILDITPCSFGGVSVITPGTNTSNQVAVLYQDVNCTEVPVAIHADQLTPTWRVYSTGSNVFQTRAGCLIGAEHVNNSYECDIPIGAGICASYQTQTNSPQQAQSVASQSIIAYTMSLGAENSVAYSNNSIAIPTNFTISVTTEILPVSMTKTSVDCTMYICGDSTECSNLLLQYGSFCTQLNRALTGIAVEQDKNTQEVFAQVKQIYKTPPIKDFGGFNFSQILPDPSKPSKRSFIEDLLFNKVTLADAGFIKQYGDCLGDIAARDLICAQKFNGLTVLPPLLTDEMIAQYTSALLAGTITSGWTFGAGAALQIPFAMQMAYRFNGIGVTQNVLYENQKLIANQFNSAIGKIQDSLSSTASALGKLQDVVNQNAQALNTLVKQLSSNFGAISSVLNDILSRLDPPEAEVQIDRLITGRLQSLQTYVTQQLIRAAEIRASANLAATKMSECVLGQSKRVDFCGKGYHLMSFPQSAPHGVVFLHVTYVPAQEKNFTTAPAICHDGKAHFPREGVFVSNGTHWFVTQRNFYEPQIITTDNTFVSGNCDVVIGIVNNTVYDPLQPELDSFKEELDKYFKNHTSPDVDLGDISGINASVVNIQKEIDRLNEVAKNLNESLIDLQELGKYEQYIKWPWYIWLGFIAGLIAIVMVTIMLCCMTSCCSCLKGCCSCGSCCKFDEDDSEPVLKGVKLHYT

SEQ ID NO: 88 - protein, 1219 aa, synthetic construct
  REGION 1..1219: note = RECOMBINANT SPIKE PROTEIN
MFVFLVLLPLVSSQCVNLTTRTQLPPAYTNSFTRGVYYPDKVFRSSVLHSTQDLFLPFFSNVTWFHAIHVSGTNGTKRFDNPVLPFNDGVYFASTEKSNIIRGWIFGTTLDSKTQSLLIVNNATNVVIKVCEFQFCNDPFLGVYYHKNNKSWMESEFRVYSSANNCTFEYVSQPFLMDLEGKQGNFKNLREFVFKNIDGYFKIYSKHTPINLVRDLPQGFSALEPLVDLPIGINITRFQTLLALHRSYLTPGDSSSGWTAGAAAYYVGYLQPRTFLLKYNENGTITDAVDCALDPLSETKCTLKSFTVEKGIYQTSNFRVQPTESIVRFPNITNLCPFGEVFNATRFASVYAWNRKRISNCVADYSVLYNSASFSTFKCYGVSPTKLNDLCFTNVYADSFVIRGDEVRQIAPGQTGKIADYNYKLPDDFTGCVIAWNSNNLDSKVGGNYNYLYRLFRKSNLKPFERDISTEIYQAGSTPCNGVEGFNCYFPLQSYGFQPTNGVGYQPYRVVVLSFELLHAPATVCGPKKSTNLVKNKCVNFNFNGLTGTGVLTESNKKFLPFQQFGRDIADTTDAVRDPQTLEILDITPCSFGGVSVITPGTNTSNQVAVLYQDVNCTEVPVAIHADQLTPTWRVYSTGSNVFQTRAGCLIGAEHVNNSYECDIPIGAGICASYQTQTNSPQQAQSVASQSIIAYTMSLGAENSVAYSNNSIAIPTNFTISVTTEILPVSMTKTSVDCTMYICGDSTECSNLLLQYGSFCTQLNRALTGIAVEQDKNTQEVFAQVKQIYKTPPIKDFGGFNFSQILPDPSKPSKRSFIEDLLFNKVTLADAGFIKQYGDCLGDIAARDLICAQKFNGLTVLPPLLTDEMIAQYTSALLAGTITSGWTFGAGAALQIPFAMQMAYRFNGIGVTQNVLYENQKLIANQFNSAIGKIQDSLSSTASALGKLQDVVNQNAQALNTLVKQLSSNFGAISSVLNDILSRLDPPEAEVQIDRLITGRLQSLQTYVTQQLIRAAEIRASANLAATKMSECVLGQSKRVDFCGKGYHLMSFPQSAPHGVVFLHVTYVPAQEKNFTTAPAICHDGKAHFPREGVFVSNGTHWFVTQRNFYEPQIITTDNTFVSGNCDVVIGIVNNTVYDPLQPELDSFKEELDKYFKNHTSPDVDLGDISGINASVVNIQKEIDRLNEVAKNLNESLIDLQELGKYEQYIKWPHHHHHH

SEQ ID NO: 89 - protein, 1206 aa, synthetic construct
  REGION 1..1206: note = RECOMBINANT SPIKE PROTEIN
QCVNLTTRTQLPPAYTNSFTRGVYYPDKVFRSSVLHSTQDLFLPFFSNVTWFHAIHVSGTNGTKRFDNPVLPFNDGVYFASTEKSNIIRGWIFGTTLDSKTQSLLIVNNATNVVIKVCEFQFCNDPFLGVYYHKNNKSWMESEFRVYSSANNCTFEYVSQPFLMDLEGKQGNFKNLREFVFKNIDGYFKIYSKHTPINLVRDLPQGFSALEPLVDLPIGINITRFQTLLALHRSYLTPGDSSSGWTAGAAAYYVGYLQPRTFLLKYNENGTITDAVDCALDPLSETKCTLKSFTVEKGIYQTSNFRVQPTESIVRFPNITNLCPFGEVFNATRFASVYAWNRKRISNCVADYSVLYNSASFSTFKCYGVSPTKLNDLCFTNVYADSFVIRGDEVRQIAPGQTGKIADYNYKLPDDFTGCVIAWNSNNLDSKVGGNYNYLYRLFRKSNLKPFERDISTEIYQAGSTPCNGVEGFNCYFPLQSYGFQPTNGVGYQPYRVVVLSFELLHAPATVCGPKKSTNLVKNKCVNFNFNGLTGTGVLTESNKKFLPFQQFGRDIADTTDAVRDPQTLEILDITPCSFGGVSVITPGTNTSNQVAVLYQDVNCTEVPVAIHADQLTPTWRVYSTGSNVFQTRAGCLIGAEHVNNSYECDIPIGAGICASYQTQTNSPQQAQSVASQSIIAYTMSLGAENSVAYSNNSIAIPTNFTISVTTEILPVSMTKTSVDCTMYICGDSTECSNLLLQYGSFCTQLNRALTGIAVEQDKNTQEVFAQVKQIYKTPPIKDFGGFNFSQILPDPSKPSKRSFIEDLLFNKVTLADAGFIKQYGDCLGDIAARDLICAQKFNGLTVLPPLLTDEMIAQYTSALLAGTITSGWTFGAGAALQIPFAMQMAYRFNGIGVTQNVLYENQKLIANQFNSAIGKIQDSLSSTASALGKLQDVVNQNAQALNTLVKQLSSNFGAISSVLNDILSRLDPPEAEVQIDRLITGRLQSLQTYVTQQLIRAAEIRASANLAATKMSECVLGQSKRVDFCGKGYHLMSFPQSAPHGVVFLHVTYVPAQEKNFTTAPAICHDGKAHFPREGVFVSNGTHWFVTQRNFYEPQIITTDNTFVSGNCDVVIGIVNNTVYDPLQPELDSFKEELDKYFKNHTSPDVDLGDISGINASVVNIQKEIDRLNEVAKNLNESLIDLQELGKYEQYIKWPHHHHHH

SEQ ID NO: 90 - protein, 17 aa, synthetic construct
  REGION 1..17: note = Linker
SGGGSGGGSGGGSGGGS

SEQ ID NO: 91 - protein, 4 aa, synthetic construct
  REGION 1..4: note = Linker
SGGG

SEQ ID NO: 92 - protein, 4 aa, synthetic construct
  REGION 1..4: note = Linker
GGGS

SEQ ID NO: 93 - protein, 5 aa, synthetic construct
  REGION 1..5: note = Linker
GGGGS

SEQ ID NO: 94 - protein, 90 aa, synthetic construct
  REGION 1..90: note = RECOMBINANT SPIKE PROTEIN
STNLVKNKCVNFNFNGLTGTGVLTESNKKFLPFQQFGRDIADTTDAVRDPQTLEILDITPCSFGGVSVITPGTNTSNQVAVLYQDVNCTE

SEQ ID NO: 95 - DNA, 3639 bp, synthetic construct
  misc_feature 1..3639: note = RECOMBINANT SPIKE PROTEIN
  source 1..3639: mol_type = other DNA
atgttcgtcttcctggtgctgctgcccctggtgtccagccagtgcgtgaacctgaccactaggactcagctgcctcccgcttacaccaactcattcactcgcggtgtgtactaccctgacaaggtcttccgttcttcagtgctgcactcaactcaggacctgttcctgcccttcttctccaacgtcacctggttccacgccatccacgtgtccggcaccaacggcactaagcgcttcgacaacccagtgctgcctttcaacgacggtgtctacttcgcttcaaccgagaagtccaacatcatccgtggatggatcttcggcaccactctggacagcaagactcagtctctgctgatcgtcaacaacgccaccaacgtggtcatcaaggtctgcgaattccagttctgcaacgacccattcctgggcgtctactaccacaagaacaacaagtcatggatggagtccgaattccgcgtctactccagcgctaacaactgcactttcgagtacgtgtcccagcctttcctgatggacctggaaggaaagcagggtaacttcaagaacctgagggagttcgtgttcaagaacatcgacggatacttcaagatttacagcaagcacaccccaatcaacctggtgcgcgacctgcctcagggtttctctgctctggagccactggtggacctgcctatcggcatcaacatcacccgcttccagactctgctggctctgcaccgttcctacctgactccaggcgactcatcttctggatggactgctggagctgctgcttactacgtgggctacctgcagcctcgcaccttcctgctgaagtacaacgaaaacggaaccatcactgacgccgtcgactgcgctctggaccctctgtcagaaaccaagtgcactctgaagtccttcaccgtggagaagggcatctaccagacttcaaacttcagggtgcagcccaccgaatccatcgtcagattccctaacatcactaacctgtgccccttcggagaggtcttcaacgccacccgcttcgcttccgtgtacgcctggaacaggaagagaatctcaaactgcgtcgctgactactccgtgctgtacaactcagcctccttcagcaccttcaagtgctacggcgtgtcaccaactaagctgaacgacctgtgcttcaccaacgtctacgccgactccttcgtgatcaggggagacgaggtcagacagatcgctcctggccagactggaaagatcgccgactacaactacaagctgcccgacgacttcaccggttgcgtcatcgcttggaacagcaacaacctggactctaaagtgggtggcaactacaactacctgtaccgcctgttccgtaagtcaaacctgaagccattcgagagggacatcagcactgaaatctaccaggccggatctaccccttgcaacggtgtcgagggcttcaactgctacttccccctgcagtcctacggtttccagccaactaacggtgtgggctaccagccttacagagtggtcgtgctgagcttcgaactgctccacgctcctgctactgtgtgcggtccaaagaagtctaccaacctggtcaagaacaagtgcgtgaacttcaacttcaacggcctgaccggaactggtgtcctgaccgagagcaacaagaagttcctgcccttccagcagttcggaagggacatcgctgacaccactgacgctgtgcgcgaccctcagaccctggaaatcctggacatcactccatgctcattcggaggtgtctccgtgatcacccctggcaccaacacttctaaccaggtcgctgtgctgtaccaggacgtcaactgcaccgaggtccctgtggccatccacgctgaccagctgacccccacttggcgcgtgtactccaccggcagcaacgtgttccagactcgtgctggttgcctgatcggcgccgagcacgtgaacaacagctacgaatgcgacatccccatcggcgctggaatctgcgcctcttaccagacccagactaacagcccacgcagggctcgctctgtggcctctcagtcaatcatcgcttacaccatgtcactgggcgctgaaaactccgtggcctactctaacaactcaatcgccatccccaccaacttcactatcagcgtgaccactgagatcctgccagtcagcatgaccaagacttctgtggactgcactatgtacatctgcggagacagcaccgaatgctctaacctgctgctgcagtacggctctttctgcacccagctgaaccgtgctctgactggaatcgccgtggagcaggacaagaacactcaggaagtcttcgctcaggtgaagcaaatctacaagaccccacctatcaaggacttcggcggattcaacttctcccagatcctgcctgacccctccaagccaagcaagcgctctttcatcgaggacctgctgttcaacaaggtcactctggccgacgctggattcatcaagcagtacggagactgcctgggtgacatcgccgctcgtgacctgatctgcgctcagaagttcaacggtctgaccgtgctgcccccactgctgactgacgaaatgatcgcccagtacactagcgccctgctggctggaaccatcacttctggttggaccttcggtgctggcgccgctctgcagatccctttcgctatgcagatggcctaccgtttcaacggaatcggtgtcacccagaacgtgctgtacgagaaccagaagctgatcgctaaccagttcaactcagccatcggaaagatccaggacagcctgagctctactgcctctgctctgggcaagctgcaggacgtcgtgaaccagaacgcccaggctctgaacaccctggtcaagcagctgtcatccaacttcggtgctatcagctctgtgctgaacgacatcctgtcccgcctggacaaggtcgaggccgaagtgcagatcgaccgcctgatcactggccgtctgcagtcactgcagacctacgtgactcagcagctgatcagggccgctgaaatcagagcctccgctaacctggccgctaccaagatgagcgagtgcgtcctgggtcaatctaagcgtgtggacttctgcggcaagggataccacctgatgtcattccctcagtctgctccccacggtgtggtgttcctgcacgtcacctacgtgccagcccaggagaagaacttcaccactgcccctgctatctgccacgacggcaaggctcacttccccagggaaggtgtcttcgtgagcaacggcacccactggttcgtcactcagagaaacttctacgagccacagatcatcaccactgacaacactttcgtgtctggaaactgcgacgtggtcatcggtatcgtcaacaacaccgtgtacgaccccctgcagccagagctggactcattcaaggaggaactggacaagtacttcaagaaccacacctcccctgacgtcgacctgggcgacatctcaggaatcaacgcttccgtcgtgaacatccagaaggagatcgaccgcctgaacgaagtggccaagaacctgaacgaaagcctgatcgacctgcaggagctgggcaagtacgaacagtacatcaagtggcct

SEQ ID NO: 96 - DNA, 3822 bp, synthetic construct
  misc_feature 1..3822: note = RECOMBINANT SPIKE PROTEIN
  source 1..3822: mol_type = other DNA
atgttcgtcttcctggtgctgctgcccctggtgtccagccagtgcgtgaacctgaccactaggactcagctgcctcccgcttacaccaactcattcactcgcggtgtgtactaccctgacaaggtcttccgttcttcagtgctgcactcaactcaggacctgttcctgcccttcttctccaacgtcacctggttccacgccatccacgtgtccggcaccaacggcactaagcgcttcgacaacccagtgctgcctttcaacgacggtgtctacttcgcttcaaccgagaagtccaacatcatccgtggatggatcttcggcaccactctggacagcaagactcagtctctgctgatcgtcaacaacgccaccaacgtggtcatcaaggtctgcgaattccagttctgcaacgacccattcctgggcgtctactaccacaagaacaacaagtcatggatggagtccgaattccgcgtctactccagcgctaacaactgcactttcgagtacgtgtcccagcctttcctgatggacctggaaggaaagcagggtaacttcaagaacctgagggagttcgtgttcaagaacatcgacggatacttcaagatttacagcaagcacaccccaatcaacctggtgcgcgacctgcctcagggtttctctgctctggagccactggtggacctgcctatcggcatcaacatcacccgcttccagactctgctggctctgcaccgttcctacctgactccaggcgactcatcttctggatggactgctggagctgctgcttactacgtgggctacctgcagcctcgcaccttcctgctgaagtacaacgaaaacggaaccatcactgacgccgtcgactgcgctctggaccctctgtcagaaaccaagtgcactctgaagtccttcaccgtggagaagggcatctaccagacttcaaacttcagggtgcagcccaccgaatccatcgtcagattccctaacatcactaacctgtgccccttcggagaggtcttcaacgccacccgcttcgcttccgtgtacgcctggaacaggaagagaatctcaaactgcgtcgctgactactccgtgctgtacaactcagcctccttcagcaccttcaagtgctacggcgtgtcaccaactaagctgaacgacctgtgcttcaccaacgtctacgccgactccttcgtgatcaggggagacgaggtcagacagatcgctcctggccagactggaaagatcgccgactacaactacaagctgcccgacgacttcaccggttgcgtcatcgcttggaacagcaacaacctggactctaaagtgggtggcaactacaactacctgtaccgcctgttccgtaagtcaaacctgaagccattcgagagggacatcagcactgaaatctaccaggccggatctaccccttgcaacggtgtcgagggcttcaactgctacttccccctgcagtcctacggtttccagccaactaacggtgtgggctaccagccttacagagtggtcgtgctgagcttcgaactgctccacgctcctgctactgtgtgcggtccaaagaagtctaccaacctggtcaagaacaagtgcgtgaacttcaacttcaacggcctgaccggaactggtgtcctgaccgagagcaacaagaagttcctgcccttccagcagttcggaagggacatcgctgacaccactgacgctgtgcgcgaccctcagaccctggaaatcctggacatcactccatgctcattcggaggtgtctccgtgatcacccctggcaccaacacttctaaccaggtcgctgtgctgtaccaggacgtcaactgcaccgaggtccctgtggccatccacgctgaccagctgacccccacttggcgcgtgtactccaccggcagcaacgtgttccagactcgtgctggttgcctgatcggcgccgagcacgtgaacaacagctacgaatgcgacatccccatcggcgctggaatctgcgcctcttaccagacccagactaacagcccacagcaggctcagtctgtggcctctcagtcaatcatcgcttacaccatgtcactgggcgctgaaaactccgtggcctactctaacaactcaatcgccatccccaccaacttcactatcagcgtgaccactgagatcctgccagtcagcatgaccaagacttctgtggactgcactatgtacatctgcggagacagcaccgaatgctctaacctgctgctgcagtacggctctttctgcacccagctgaaccgtgctctgactggaatcgccgtggagcaggacaagaacactcaggaagtcttcgctcaggtgaagcaaatctacaagaccccacctatcaaggacttcggcggattcaacttctcccagatcctgcctgacccctccaagccaagcaagcgctctttcatcgaggacctgctgttcaacaaggtcactctggccgacgctggattcatcaagcagtacggagactgcctgggtgacatcgccgctcgtgacctgatctgcgctcagaagttcaacggtctgaccgtgctgcccccactgctgactgacgaaatgatcgcccagtacactagcgccctgctggctggaaccatcacttctggttggaccttcggtgctggcgccgctctgcagatccctttcgctatgcagatggcctaccgtttcaacggaatcggtgtcacccagaacgtgctgtacgagaaccagaagctgatcgctaaccagttcaactcagccatcggaaagatccaggacagcctgagctctactgcctctgctctgggcaagctgcaggacgtcgtgaaccagaacgcccaggctctgaacaccctggtcaagcagctgtcatccaacttcggtgctatcagctctgtgctgaacgacatcctgtcccgcctggaccctcccgaggccgaagtgcagatcgaccgcctgatcactggccgtctgcagtcactgcagacctacgtgactcagcagctgatcagggccgctgaaatcagagcctccgctaacctggccgctaccaagatgagcgagtgcgtcctgggtcaatctaagcgtgtggacttctgcggcaagggataccacctgatgtcattccctcagtctgctccccacggtgtggtgttcctgcacgtcacctacgtgccagcccaggagaagaacttcaccactgcccctgctatctgccacgacggcaaggctcacttccccagggaaggtgtcttcgtgagcaacggcacccactggttcgtcactcagagaaacttctacgagccacagatcatcaccactgacaacactttcgtgtctggaaactgcgacgtggtcatcggtatcgtcaacaacaccgtgtacgaccccctgcagccagagctggactcattcaaggaggaactggacaagtacttcaagaaccacacctcccctgacgtcgacctgggcgacatctcaggaatcaacgcttccgtcgtgaacatccagaaggagatcgaccgcctgaacgaagtggccaagaacctgaacgaaagcctgatcgacctgcaggagctgggcaagtacgaacagtacatcaagtggccttggtacatctggctgggtttcatcgctggcctcatcgctatcgtgatggtgaccatcatgctgtgctgcatgacttcatgctgctcctgcctgaagggctgctgcagctgcggatcttgctgcaagttcgacgaggacgactctgaacccgtcctgaagggcgtgaagctgcactacacctaa

SEQ ID NO: 97 - protein, 4 aa, synthetic construct
  REGION 1..4: note = Recombinant Furin Cleavage Site
GSAS

SEQ ID NO: 98 - protein, 8 aa, synthetic construct
  REGION 1..8: note = HRV3C Cleavage Site
LEVLFQGP

SEQ ID NO: 99 - protein, 8 aa, synthetic construct
  REGION 1..8: note = Strep-tag
WSHPQFEK

SEQ ID NO: 100 - protein, 6 aa, synthetic construct
  REGION 1..6: note = 6X-His Tag
HHHHHH

SEQ ID NO: 101 - protein, 10 aa, synthetic construct
  REGION 1..10: note = His-Tag
  SITE 6: note = May be present or absent
  SITE 7: note = May be present or absent
  SITE 8: note = May be present or absent
  SITE 9: note = May be present or absent
  SITE 10: note = May be present or absent
HHHHHHHHHH

SEQ ID NO: 102 - protein, 8 aa, synthetic construct
  REGION 1..8: note = 8X-His Tag
HHHHHHHH

SEQ ID NO: 103 - protein, 30 aa, synthetic construct
  REGION 1..30: note = FOLDON
GYIPEAPRDGQAYVRKDGEWVLLSTFLSPA

SEQ ID NO: 104 - protein, 10 aa, synthetic construct
  REGION 1..10: note = RECOMBINANT SPIKE PROTEIN
EDLLFNKVTL

SEQ ID NO: 105 - protein, 1263 aa, synthetic construct
  REGION 1..1263: note = RECOMBINANT SPIKE PROTEIN
MFVFLVLLPLVSSQCVNLTTRTQLPPAYTNSFTRGVYYPDKVFRSSVLHSTQDLFLPFFSNVTWFHAIHVSGTNGTKRFDNPVLPFNDGVYFASTEKSNIIRGWIFGTTLDSKTQSLLIVNNATNVVIKVCEFQFCNDPFLGVYYHKNNKSWMESEFRVYSSANNCTFEYVSQPFLMDLEGKQGNFKNLREFVFKNIDGYFKIYSKHTPINLVRDLPQGFSALEPLVDLPIGINITRFQTLLALHRSYLTPGDSSSGWTAGAAAYYVGYLQPRTFLLKYNENGTITDAVDCALDPLSETKCTLKSFTVEKGIYQTSNFRVQPTESIVRFPNITNLCPFGEVFNATRFASVYAWNRKRISNCVADYSVLYNSASFSTFKCYGVSPTKLNDLCFTNVYADSFVIRGDEVRQIAPGQTGKIADYNYKLPDDFTGCVIAWNSNNLDSKVGGNYNYLYRLFRKSNLKPFERDISTEIYQAGSTPCNGVEGFNCYFPLQSYGFQPTNGVGYQPYRVVVLSFELLHAPATVCGPKKSTNLVKNKCVNFNFNGLTGTGVLTESNKKFLPFQQFGRDIADTTDAVRDPQTLEILDITPCSFGGVSVITPGTNTSNQVAVLYQDVNCTEVPVAIHADQLTPTWRVYSTGSNVFQTRAGCLIGAEHVNNSYECDIPIGAGICASYQTQTNSPQQAQSVASQSIIAYTMSLGAENSVAYSNNSIAIPTNFTISVTTEILPVSMTKTSVDCTMYICGDSTECSNLLLQYGSFCTQLNRALTGIAVEQDKNTQEVFAQVKQIYKTPPIKDFGGFNFSQILPDPSKPSKRSFIADAGFIKQYGDCLGDIAARDLICAQKFNGLTVLPPLLTDEMIAQYTSALLAGTITSGWTFGAGAALQIPFAMQMAYRFNGIGVTQNVLYENQKLIANQFNSAIGKIQDSLSSTASALGKLQDVVNQNAQALNTLVKQLSSNFGAISSVLNDILSRLDPPEAEVQIDRLITGRLQSLQTYVTQQLIRAAEIRASANLAATKMSECVLGQSKRVDFCGKGYHLMSFPQSAPHGVVFLHVTYVPAQEKNFTTAPAICHDGKAHFPREGVFVSNGTHWFVTQRNFYEPQIITTDNTFVSGNCDVVIGIVNNTVYDPLQPELDSFKEELDKYFKNHTSPDVDLGDISGINASVVNIQKEIDRLNEVAKNLNESLIDLQELGKYEQYIKWPWYIWLGFIAGLIAIVMVTIMLCCMTSCCSCLKGCCSCGSCCKFDEDDSEPVLKGVKLHYT

SEQ ID NO: 106 - protein, 1250 aa, synthetic construct
  REGION 1..1250: note = RECOMBINANT SPIKE PROTEIN
QCVNLTTRTQLPPAYTNSFTRGVYYPDKVFRSSVLHSTQDLFLPFFSNVTWFHAIHVSGTNGTKRFDNPVLPFNDGVYFASTEKSNIIRGWIFGTTLDSKTQSLLIVNNATNVVIKVCEFQFCNDPFLGVYYHKNNKSWMESEFRVYSSANNCTFEYVSQPFLMDLEGKQGNFKNLREFVFKNIDGYFKIYSKHTPINLVRDLPQGFSALEPLVDLPIGINITRFQTLLALHRSYLTPGDSSSGWTAGAAAYYVGYLQPRTFLLKYNENGTITDAVDCALDPLSETKCTLKSFTVEKGIYQTSNFRVQPTESIVRFPNITNLCPFGEVFNATRFASVYAWNRKRISNCVADYSVLYNSASFSTFKCYGVSPTKLNDLCFTNVYADSFVIRGDEVRQIAPGQTGKIADYNYKLPDDFTGCVIAWNSNNLDSKVGGNYNYLYRLFRKSNLKPFERDISTEIYQAGSTPCNGVEGFNCYFPLQSYGFQPTNGVGYQPYRVVVLSFELLHAPATVCGPKKSTNLVKNKCVNFNFNGLTGTGVLTESNKKFLPFQQFGRDIADTTDAVRDPQTLEILDITPCSFGGVSVITPGTNTSNQVAVLYQDVNCTEVPVAIHADQLTPTWRVYSTGSNVFQTRAGCLIGAEHVNNSYECDIPIGAGICASYQTQTNSPQQAQSVASQSIIAYTMSLGAENSVAYSNNSIAIPTNFTISVTTEILPVSMTKTSVDCTMYICGDSTECSNLLLQYGSFCTQLNRALTGIAVEQDKNTQEVFAQVKQIYKTPPIKDFGGFNFSQILPDPSKPSKRSFIADAGFIKQYGDCLGDIAARDLICAQKFNGLTVLPPLLTDEMIAQYTSALLAGTITSGWTFGAGAALQIPFAMQMAYRFNGIGVTQNVLYENQKLIANQFNSAIGKIQDSLSSTASALGKLQDVVNQNAQALNTLVKQLSSNFGAISSVLNDILSRLDPPEAEVQIDRLITGRLQSLQTYVTQQLIRAAEIRASANLAATKMSECVLGQSKRVDFCGKGYHLMSFPQSAPHGVVFLHVTYVPAQEKNFTTAPAICHDGKAHFPREGVFVSNGTHWFVTQRNFYEPQIITTDNTFVSGNCDVVIGIVNNTVYDPLQPELDSFKEELDKYFKNHTSPDVDLGDISGINASVVNIQKEIDRLNEVAKNLNESLIDLQELGKYEQYIKWPWYIWLGFIAGLIAIVMVTIMLCCMTSCCSCLKGCCSCGSCCKFDEDDSEPVLKGVKLHYT

SEQ ID NO: 107 - protein, 1263 aa, synthetic construct
  REGION 1..1263: note = RECOMBINANT SPIKE PROTEIN
MFVFLVLLPLVSSQCVNLTTRTQLPPAYTNSFTRGVYYPDKVFRSSVLHSTQDLFLPFFSNVTWFHAIHVSGTNGTKRFDNPVLPFNDGVYFASTEKSNIIRGWIFGTTLDSKTQSLLIVNNATNVVIKVCEFQFCNDPFLGVYYHKNNKSWMESEFRVYSSANNCTFEYVSQPFLMDLEGKQGNFKNLREFVFKNIDGYFKIYSKHTPINLVRDLPQGFSALEPLVDLPIGINITRFQTLLALHRSYLTPGDSSSGWTAGAAAYYVGYLQPRTFLLKYNENGTITDAVDCALDPLSETKCTLKSFTVEKGIYQTSNFRVQPTESIVRFPNITNLCPFGEVFNATRFASVYAWNRKRISNCVADYSVLYNSASFSTFKCYGVSPTKLNDLCFTNVYADSFVIRGDEVRQIAPGQTGKIADYNYKLPDDFTGCVIAWNSNNLDSKVGGNYNYLYRLFRKSNLKPFERDISTEIYQAGSTPCNGVEGFNCYFPLQSYGFQPTNGVGYQPYRVVVLSFELLHAPATVCGPKKSTNLVKNKCVNFNFNGLTGTGVLTESNKKFLPFQQFGRDIADTTDAVRDPQTLEILDITPCSFGGVSVITPGTNTSNQVAVLYQDVNCTEVPVAIHADQLTPTWRVYSTGSNVFQTRAGCLIGAEHVNNSYECDIPIGAGICASYQTQTNSPRRARSVASQSIIAYTMSLGAENSVAYSNNSIAIPTNFTISVTTEILPVSMTKTSVDCTMYICGDSTECSNLLLQYGSFCTQLNRALTGIAVEQDKNTQEVFAQVKQIYKTPPIKDFGGFNFSQILPDPSKPSKRSFIADAGFIKQYGDCLGDIAARDLICAQKFNGLTVLPPLLTDEMIAQYTSALLAGTITSGWTFGAGAALQIPFAMQMAYRFNGIGVTQNVLYENQKLIANQFNSAIGKIQDSLSSTASALGKLQDVVNQNAQALNTLVKQLSSNFGAISSVLNDILSRLDKVEAEVQIDRLITGRLQSLQTYVTQQLIRAAEIRASANLAATKMSECVLGQSKRVDFCGKGYHLMSFPQSAPHGVVFLHVTYVPAQEKNFTTAPAICHDGKAHFPREGVFVSNGTHWFVTQRNFYEPQIITTDNTFVSGNCDVVIGIVNNTVYDPLQPELDSFKEELDKYFKNHTSPDVDLGDISGINASVVNIQKEIDRLNEVAKNLNESLIDLQELGKYEQYIKWPWYIWLGFIAGLIAIVMVTIMLCCMTSCCSCLKGCCSCGSCCKFDEDDSEPVLKGVKLHYT

SEQ ID NO: 108 - protein, 1250 aa, synthetic construct
  REGION 1..1250: note = RECOMBINANT SPIKE PROTEIN
QCVNLTTRTQLPPAYTNSFTRGVYYPDKVFRSSVLHSTQDLFLPFFSNVTWFHAIHVSGTNGTKRFDNPVLPFNDGVYFASTEKSNIIRGWIFGTTLDSKTQSLLIVNNATNVVIKVCEFQFCNDPFLGVYYHKNNKSWMESEFRVYSSANNCTFEYVSQPFLMDLEGKQGNFKNLREFVFKNIDGYFKIYSKHTPINLVRDLPQGFSALEPLVDLPIGINITRFQTLLALHRSYLTPGDSSSGWTAGAAAYYVGYLQPRTFLLKYNENGTITDAVDCALDPLSETKCTLKSFTVEKGIYQTSNFRVQPTESIVRFPNITNLCPFGEVFNATRFASVYAWNRKRISNCVADYSVLYNSASFSTFKCYGVSPTKLNDLCFTNVYADSFVIRGDEVRQIAPGQTGKIADYNYKLPDDFTGCVIAWNSNNLDSKVGGNYNYLYRLFRKSNLKPFERDISTEIYQAGSTPCNGVEGFNCYFPLQSYGFQPTNGVGYQPYRVVVLSFELLHAPATVCGPKKSTNLVKNKCVNFNFNGLTGTGVLTESNKKFLPFQQFGRDIADTTDAVRDPQTLEILDITPCSFGGVSVITPGTNTSNQVAVLYQDVNCTEVPVAIHADQLTPTWRVYSTGSNVFQTRAGCLIGAEHVNNSYECDIPIGAGICASYQTQTNSPRRARSVASQSIIAYTMSLGAENSVAYSNNSIAIPTNFTISVTTEILPVSMTKTSVDCTMYICGDSTECSNLLLQYGSFCTQLNRALTGIAVEQDKNTQEVFAQVKQIYKTPPIKDFGGFNFSQILPDPSKPSKRSFIADAGFIKQYGDCLGDIAARDLICAQKFNGLTVLPPLLTDEMIAQYTSALLAGTITSGWTFGAGAALQIPFAMQMAYRFNGIGVTQNVLYENQKLIANQFNSAIGKIQDSLSSTASALGKLQDVVNQNAQALNTLVKQLSSNFGAISSVLNDILSRLDKVEAEVQIDRLITGRLQSLQTYVTQQLIRAAEIRASANLAATKMSECVLGQSKRVDFCGKGYHLMSFPQSAPHGVVFLHVTYVPAQEKNFTTAPAICHDGKAHFPREGVFVSNGTHWFVTQRNFYEPQIITTDNTFVSGNCDVVIGIVNNTVYDPLQPELDSFKEELDKYFKNHTSPDVDLGDISGINASVVNIQKEIDRLNEVAKNLNESLIDLQELGKYEQYIKWPWYIWLGFIAGLIAIVMVTIMLCCMTSCCSCLKGCCSCGSCCKFDEDDSEPVLKGVKLHYT

SEQ ID NO: 109 - protein, 1273 aa, synthetic construct
  REGION 1..1273: note = Recombinant CoV S polypeptide
MFVFLVLLPLVSSQCVNLTTRTQLPPAYTNSFTRGVYYPDKVFRSSVLHSTQDLFLPFFSNVTWFHAIHVSGTNGTKRFDNPVLPFNDGVYFASTEKSNIIRGWIFGTTLDSKTQSLLIVNNATNVVIKVCEFQFCNDPFLGVYYHKNNKSWMESEFRVYSSANNCTFEYVSQPFLMDLEGKQGNFKNLREFVFKNIDGYFKIYSKHTPINLVRDLPQGFSALEPLVDLPIGINITRFQTLLALHRSYLTPGDSSSGWTAGAAAYYVGYLQPRTFLLKYNENGTITDAVDCALDPLSETKCTLKSFTVEKGIYQTSNFRVQPTESIVRFPNITNLCPFGEVFNATRFASVYAWNRKRISNCVADYSVLYNSASFSTFKCYGVSPTKLNDLCFTNVYADSFVIRGDEVRQIAPGQTGKIADYNYKLPDDFTGCVIAWNSNNLDSKVGGNYNYLYRLFRKSNLKPFERDISTEIYQAGSTPCNGVEGFNCYFPLQSYGFQPTNGVGYQPYRVVVLSFELLHAPATVCGPKKSTNLVKNKCVNFNFNGLTGTGVLTESNKKFLPFQQFGRDIADTTDAVRDPQTLEILDITPCSFGGVSVITPGTNTSNQVAVLYQDVNCTEVPVAIHADQLTPTWRVYSTGSNVFQTRAGCLIGAEHVNNSYECDIPIGAGICASYQTQTNSPGSASSVASQSIIAYTMSLGAENSVAYSNNSIAIPTNFTISVTTEILPVSMTKTSVDCTMYICGDSTECSNLLLQYGSFCTQLNRALTGIAVEQDKNTQEVFAQVKQIYKTPPIKDFGGFNFSQILPDPSKPSKRSFIEDLLFNKVTLADAGFIKQYGDCLGDIAARDLICAQKFNGLTVLPPLLTDEMIAQYTSALLAGTITSGWTFGAGAALQIPFAMQMAYRFNGIGVTQNVLYENQKLIANQFNSAIGKIQDSLSSTASALGKLQDVVNQNAQALNTLVKQLSSNFGAISSVLNDILSRLDPPEAEVQIDRLITGRLQSLQTYVTQQLIRAAEIRASANLAATKMSECVLGQSKRVDFCGKGYHLMSFPQSAPHGVVFLHVTYVPAQEKNFTTAPAICHDGKAHFPREGVFVSNGTHWFVTQRNFYEPQIITTDNTFVSGNCDVVIGIVNNTVYDPLQPELDSFKEELDKYFKNHTSPDVDLGDISGINASVVNIQKEIDRLNEVAKNLNESLIDLQELGKYEQYIKWPWYIWLGFIAGLIAIVMVTIMLCCMTSCCSCLKGCCSCGSCCKFDEDDSEPVLKGVKLHYT

SEQ ID NO: 110 - protein, 1260 aa, synthetic construct
  REGION 1..1260: note = Recombinant CoV S polypeptide
QCVNLTTRTQLPPAYTNSFTRGVYYPDKVFRSSVLHSTQDLFLPFFSNVTWFHAIHVSGTNGTKRFDNPVLPFNDGVYFASTEKSNIIRGWIFGTTLDSKTQSLLIVNNATNVVIKVCEFQFCNDPFLGVYYHKNNKSWMESEFRVYSSANNCTFEYVSQPFLMDLEGKQGNFKNLREFVFKNIDGYFKIYSKHTPINLVRDLPQGFSALEPLVDLPIGINITRFQTLLALHRSYLTPGDSSSGWTAGAAAYYVGYLQPRTFLLKYNENGTITDAVDCALDPLSETKCTLKSFTVEKGIYQTSNFRVQPTESIVRFPNITNLCPFGEVFNATRFASVYAWNRKRISNCVADYSVLYNSASFSTFKCYGVSPTKLNDLCFTNVYADSFVIRGDEVRQIAPGQTGKIADYNYKLPDDFTGCVIAWNSNNLDSKVGGNYNYLYRLFRKSNLKPFERDISTEIYQAGSTPCNGVEGFNCYFPLQSYGFQPTNGVGYQPYRVVVLSFELLHAPATVCGPKKSTNLVKNKCVNFNFNGLTGTGVLTESNKKFLPFQQFGRDIADTTDAVRDPQTLEILDITPCSFGGVSVITPGTNTSNQVAVLYQDVNCTEVPVAIHADQLTPTWRVYSTGSNVFQTRAGCLIGAEHVNNSYECDIPIGAGICASYQTQTNSPGSASSVASQSIIAYTMSLGAENSVAYSNNSIAIPTNFTISVTTEILPVSMTKTSVDCTMYICGDSTECSNLLLQYGSFCTQLNRALTGIAVEQDKNTQEVFAQVKQIYKTPPIKDFGGFNFSQILPDPSKPSKRSFIEDLLFNKVTLADAGFIKQYGDCLGDIAARDLICAQKFNGLTVLPPLLTDEMIAQYTSALLAGTITSGWTFGAGAALQIPFAMQMAYRFNGIGVTQNVLYENQKLIANQFNSAIGKIQDSLSSTASALGKLQDVVNQNAQALNTLVKQLSSNFGAISSVLNDILSRLDPPEAEVQIDRLITGRLQSLQTYVTQQLIRAAEIRASANLAATKMSECVLGQSKRVDFCGKGYHLMSFPQSAPHGVVFLHVTYVPAQEKNFTTAPAICHDGKAHFPREGVFVSNGTHWFVTQRNFYEPQIITTDNTFVSGNCDVVIGIVNNTVYDPLQPELDSFKEELDKYFKNHTSPDVDLGDISGINASVVNIQKEIDRLNEVAKNLNESLIDLQELGKYEQYIKWPWYIWLGFIAGLIAIVMVTIMLCCMTSCCSCLKGCCSCGSCCKFDEDDSEPVLKGVKLHYT

SEQ ID NO: 111 - protein, 4 aa, synthetic construct
  REGION 1..4: note = Recombinant Furin Cleavage Site
GSGA

SEQ ID NO: 112 - protein, 1260 aa, synthetic construct
  REGION 1..1260: note = Recombinant SARS-CoV-2 spike protein
QCVNLTTRTQLPPAYTNSFTRGVYYPDKVFRSSVLHSTQDLFLPFFSNVTWFHAIHVSGTNGTKRFDNPVLPFNDGVYFASTEKSNIIRGWIFGTTLDSKTQSLLIVNNATNVVIKVCEFQFCNDPFLGVYYHKNNKSWMESEFRVYSSANNCTFEYVSQPFLMDLEGKQGNFKNLREFVFKNIDGYFKIYSKHTPINLVRDLPQGFSALEPLVDLPIGINITRFQTLLALHRSYLTPGDSSSGWTAGAAAYYVGYLQPRTFLLKYNENGTITDAVDCALDPLSETKCTLKSFTVEKGIYQTSNFRVQPTESIVRFPNITNLCPFGEVFNATRFASVYAWNRKRISNCVADYSVLYNSASFSTFKCYGVSPTKLNDLCFTNVYADSFVIRGDEVRQIAPGQTGKIADYNYKLPDDFTGCVIAWNSNNLDSKVGGNYNYLYRLFRKSNLKPFERDISTEIYQAGSTPCNGVEGFNCYFPLQSYGFQPTYGVGYQPYRVVVLSFELLHAPATVCGPKKSTNLVKNKCVNFNFNGLTGTGVLTESNKKFLPFQQFGRDIADTTDAVRDPQTLEILDITPCSFGGVSVITPGTNTSNQVAVLYQDVNCTEVPVAIHADQLTPTWRVYSTGSNVFQTRAGCLIGAEHVNNSYECDIPIGAGICASYQTQTNSPQQAQSVASQSIIAYTMSLGAENSVAYSNNSIAIPTNFTISVTTEILPVSMTKTSVDCTMYICGDSTECSNLLLQYGSFCTQLNRALTGIAVEQDKNTQEVFAQVKQIYKTPPIKDFGGFNFSQILPDPSKPSKRSFIEDLLFNKVTLADAGFIKQYGDCLGDIAARDLICAQKFNGLTVLPPLLTDEMIAQYTSALLAGTITSGWTFGAGAALQIPFAMQMAYRFNGIGVTQNVLYENQKLIANQFNSAIGKIQDSLSSTASALGKLQDVVNQNAQALNTLVKQLSSNFGAISSVLNDILSRLDPPEAEVQIDRLITGRLQSLQTYVTQQLIRAAEIRASANLAATKMSECVLGQSKRVDFCGKGYHLMSFPQSAPHGVVFLHVTYVPAQEKNFTTAPAICHDGKAHFPREGVFVSNGTHWFVTQRNFYEPQIITTDNTFVSGNCDVVIGIVNNTVYDPLQPELDSFKEELDKYFKNHTSPDVDLGDISGINASVVNIQKEIDRLNEVAKNLNESLIDLQELGKYEQYIKWPWYIWLGFIAGLIAIVMVTIMLCCMTSCCSCLKGCCSCGSCCKFDEDDSEPVLKGVKLHYT

SEQ ID NO: 113 - protein, 1260 aa, synthetic construct
  REGION 1..1260: note = Recombinant SARS-CoV-2 spike protein
QCVNLTTRTQLPPAYTNSFTRGVYYPDKVFRSSVLHSTQDLFLPFFSNVTWFHAIHVSGTNGTKRFDNPVLPFNDGVYFASTEKSNIIRGWIFGTTLDSKTQSLLIVNNATNVVIKVCEFQFCNDPFLGVYYHKNNKSWMESEFRVYSSANNCTFEYVSQPFLMDLEGKQGNFKNLREFVFKNIDGYFKIYSKHTPINLVRDLPQGFSALEPLVDLPIGINITRFQTLLALHRSYLTPGDSSSGWTAGAAAYYVGYLQPRTFLLKYNENGTITDAVDCALDPLSETKCTLKSFTVEKGIYQTSNFRVQPTESIVRFPNITNLCPFGEVFNATRFASVYAWNRKRISNCVADYSVLYNSASFSTFKCYGVSPTKLNDLCFTNVYADSFVIRGDEVRQIAPGQTGKIADYNYKLPDDFTGCVIAWNSNNLDSKVGGNYNYLYRLFRKSNLKPFERDISTEIYQAGSTPCNGVEGFNCYFPLQSYGFQPTYGVGYQPYRVVVLSFELLHAPATVCGPKKSTNLVKNKCVNFNFNGLTGTGVLTESNKKFLPFQQFGRDIADTTDAVRDPQTLEILDITPCSFGGVSVITPGTNTSNQVAVLYQGVNCTEVPVAIHADQLTPTWRVYSTGSNVFQTRAGCLIGAEHVNNSYECDIPIGAGICASYQTQTNSPQQAQSVASQSIIAYTMSLGAENSVAYSNNSIAIPTNFTISVTTEILPVSMTKTSVDCTMYICGDSTECSNLLLQYGSFCTQLNRALTGIAVEQDKNTQEVFAQVKQIYKTPPIKDFGGFNFSQILPDPSKPSKRSFIEDLLFNKVTLADAGFIKQYGDCLGDIAARDLICAQKFNGLTVLPPLLTDEMIAQYTSALLAGTITSGWTFGAGAALQIPFAMQMAYRFNGIGVTQNVLYENQKLIANQFNSAIGKIQDSLSSTASALGKLQDVVNQNAQALNTLVKQLSSNFGAISSVLNDILSRLDPPEAEVQIDRLITGRLQSLQTYVTQQLIRAAEIRASANLAATKMSECVLGQSKRVDFCGKGYHLMSFPQSAPHGVVFLHVTYVPAQEKNFTTAPAICHDGKAHFPREGVFVSNGTHWFVTQRNFYEPQIITTDNTFVSGNCDVVIGIVNNTVYDPLQPELDSFKEELDKYFKNHTSPDVDLGDISGINASVVNIQKEIDRLNEVAKNLNESLIDLQELGKYEQYIKWPWYIWLGFIAGLIAIVMVTIMLCCMTSCCSCLKGCCSCGSCCKFDEDDSEPVLKGVKLHYT

SEQ ID NO: 114 - protein, 1257 aa, synthetic construct
  REGION 1..1257: note = Recombinant SARS-CoV-2 spike protein
QCVNLTTRTQLPPAYTNSFTRGVYYPDKVFRSSVLHSTQDLFLPFFSNVTWFHAISGTNGTKRFDNPVLPFNDGVYFASTEKSNIIRGWIFGTTLDSKTQSLLIVNNATNVVIKVCEFQFCNDPFLGVYHKNNKSWMESEFRVYSSANNCTFEYVSQPFLMDLEGKQGNFKNLREFVFKNIDGYFKIYSKHTPINLVRDLPQGFSALEPLVDLPIGINITRFQTLLALHRSYLTPGDSSSGWTAGAAAYYVGYLQPRTFLLKYNENGTITDAVDCALDPLSETKCTLKSFTVEKGIYQTSNFRVQPTESIVRFPNITNLCPFGEVFNATRFASVYAWNRKRISNCVADYSVLYNSASFSTFKCYGVSPTKLNDLCFTNVYADSFVIRGDEVRQIAPGQTGKIADYNYKLPDDFTGCVIAWNSNNLDSKVGGNYNYLYRLFRKSNLKPFERDISTEIYQAGSTPCNGVEGFNCYFPLQSYGFQPTYGVGYQPYRVVVLSFELLHAPATVCGPKKSTNLVKNKCVNFNFNGLTGTGVLTESNKKFLPFQQFGRDIDDTTDAVRDPQTLEILDITPCSFGGVSVITPGTNTSNQVAVLYQGVNCTEVPVAIHADQLTPTWRVYSTGSNVFQTRAGCLIGAEHVNNSYECDIPIGAGICASYQTQTNSHQQAQSVASQSIIAYTMSLGAENSVAYSNNSIAIPINFTISVTTEILPVSMTKTSVDCTMYICGDSTECSNLLLQYGSFCTQLNRALTGIAVEQDKNTQEVFAQVKQIYKTPPIKDFGGFNFSQILPDPSKPSKRSFIEDLLFNKVTLADAGFIKQYGDCLGDIAARDLICAQKFNGLTVLPPLLTDEMIAQYTSALLAGTITSGWTFGAGAALQIPFAMQMAYRFNGIGVTQNVLYENQKLIANQFNSAIGKIQDSLSSTASALGKLQDVVNQNAQALNTLVKQLSSNFGAISSVLNDILARLDPPEAEVQIDRLITGRLQSLQTYVTQQLIRAAEIRASANLAATKMSECVLGQSKRVDFCGKGYHLMSFPQSAPHGVVFLHVTYVPAQEKNFTTAPAICHDGKAHFPREGVFVSNGTHWFVTQRNFYEPQIITTHNTFVSGNCDVVIGIVNNTVYDPLQPELDSFKEELDKYFKNHTSPDVDLGDISGINASVVNIQKEIDRLNEVAKNLNESLIDLQELGKYEQYIKWPWYIWLGFIAGLIAIVMVTIMLCCMTSCCSCLKGCCSCGSCCKFDEDDSEPVLKGVKLHYT

SEQ ID NO: 115 - protein, 1260 aa, synthetic construct
  REGION 1..1260: note = Recombinant SARS-CoV-2 spike protein
QCVNLTTRTQLPPAYTNSFTRGVYYPDKVFRSSVLHSTQDLFLPFFSNVTWFHAIHVSGTNGTKRFANPVLPFNDGVYFASTEKSNIIRGWIFGTTLDSKTQSLLIVNNATNVVIKVCEFQFCNDPFLGVYYHKNNKSWMESEFRVYSSANNCTFEYVSQPFLMDLEGKQGNFKNLREFVFKNIDGYFKIYSKHTPINLVRGLPQGFSALEPLVDLPIGINITRFQTLHALHRSYLTPGDSSSGWTAGAAAYYVGYLQPRTFLLKYNENGTITDAVDCALDPLSETKCTLKSFTVEKGIYQTSNFRVQPTESIVRFPNITNLCPFGEVFNATRFASVYAWNRKRISNCVADYSVLYNSASFSTFKCYGVSPTKLNDLCFTNVYADSFVIRGDEVRQIAPGQTGNIADYNYKLPDDFTGCVIAWNSNNLDSKVGGNYNYLYRLFRKSNLKPFERDISTEIYQAGSTPCNGVKGFNCYFPLQSYGFQPTYGVGYQPYRVVVLSFELLHAPATVCGPKKSTNLVKNKCVNFNFNGLTGTGVLTESNKKFLPFQQFGRDIADTTDAVRDPQTLEILDITPCSFGGVSVITPGTNTSNQVAVLYQGVNCTEVPVAIHADQLTPTWRVYSTGSNVFQTRAGCLIGAEHVNNSYECDIPIGAGICASYQTQTNSPQQAQSVASQSIIAYTMSLGVENSVAYSNNSIAIPTNFTISVTTEILPVSMTKTSVDCTMYICGDSTECSNLLLQYGSFCTQLNRALTGIAVEQDKNTQEVFAQVKQIYKTPPIKDFGGFNFSQILPDPSKPSKRSFIEDLLFNKVTLADAGFIKQYGDCLGDIAARDLICAQKFNGLTVLPPLLTDEMIAQYTSALLAGTITSGWTFGAGAALQIPFAMQMAYRFNGIGVTQNVLYENQKLIANQFNSAIGKIQDSLSSTASALGKLQDVVNQNAQALNTLVKQLSSNFGAISSVLNDILSRLDPPEAEVQIDRLITGRLQSLQTYVTQQLIRAAEIRASANLAATKMSECVLGQSKRVDFCGKGYHLMSFPQSAPHGVVFLHVTYVPAQEKNFTTAPAICHDGKAHFPREGVFVSNGTHWFVTQRNFYEPQIITTDNTFVSGNCDVVIGIVNNTVYDPLQPELDSFKEELDKYFKNHTSPDVDLGDISGINASVVNIQKEIDRLNEVAKNLNESLIDLQELGKYEQYIKWPWYIWLGFIAGLIAIVMVTIMLCCMTSCCSCLKGCCSCGSCCKFDEDDSEPVLKGVKLHYT

SEQ ID NO: 116 - protein, 196 aa, Severe acute respiratory syndrome-related coronavirus
LCPFGEVFNATRFASVYAWNRKRISNCVADYSVLYNSASFSTFKCYGVSPTKLNDLCFTNVYADSFVIRGDEVRQIAPGQTGKIADYNYKLPDDFTGCVIAWNSNNLDSKVGGNYNYLYRLFRKSNLKPFERDISTEIYQAGSTPCNGVEGFNCYFPLQSYGFQPTNGVGYQPYRVVVLSFELLHAPATVCGPKKS

SEQ ID NO: 117 - protein, 13 aa, synthetic construct
  REGION 1..13: note = signal peptide
MFVFLVLLPLVSI

SEQ ID NO: 118 - protein, 292 aa, Severe acute respiratory syndrome-related coronavirus
QCVNLTTRTQLPPAYTNSFTRGVYYPDKVFRSSVLHSTQDLFLPFFSNVTWFHAIHVSGTNGTKRFDNPVLPFNDGVYFASTEKSNIIRGWIFGTTLDSKTQSLLIVNNATNVVIKVCEFQFCNDPFLGVYYHKNNKSWMESEFRVYSSANNCTFEYVSQPFLMDLEGKQGNFKNLREFVFKNIDGYFKIYSKHTPINLVRDLPQGFSALEPLVDLPIGINITRFQTLLALHRSYLTPGDSSSGWTAGAAAYYVGYLQPRTFLLKYNENGTITDAVDCALDPLSETKCTLKS

SEQ ID NO: 119 - protein, 83 aa, Severe acute respiratory syndrome-related coronavirus
MAYRFNGIGVTQNVLYENQKLIANQFNSAIGKIQDSLSSTASALGKLQDVVNQNAQALNTLVKQLSSNFGAISSVLNDILSRL

SEQ ID NO: 120 - protein, 588 aa, Severe acute respiratory syndrome-related coronavirus
SVASQSIIAYTMSLGAENSVAYSNNSIAIPTNFTISVTTEILPVSMTKTSVDCTMYICGDSTECSNLLLQYGSFCTQLNRALTGIAVEQDKNTQEVFAQVKQIYKTPPIKDFGGFNFSQILPDPSKPSKRSFIEDLLFNKVTLADAGFIKQYGDCLGDIAARDLICAQKFNGLTVLPPLLTDEMIAQYTSALLAGTITSGWTFGAGAALQIPFAMQMAYRFNGIGVTQNVLYENQKLIANQFNSAIGKIQDSLSSTASALGKLQDVVNQNAQALNTLVKQLSSNFGAISSVLNDILSRLDKVEAEVQIDRLITGRLQSLQTYVTQQLIRAAEIRASANLAATKMSECVLGQSKRVDFCGKGYHLMSFPQSAPHGVVFLHVTYVPAQEKNFTTAPAICHDGKAHFPREGVFVSNGTHWFVTQRNFYEPQIITTDNTFVSGNCDVVIGIVNNTVYDPLQPELDSFKEELDKYFKNHTSPDVDLGDISGINASVVNIQKEIDRLNEVAKNLNESLIDLQELGKYEQYIKWPWYIWLGFIAGLIAIVMVTIMLCCMTSCCSCLKGCCSCGSCCKFDEDDSEPVLKGVKLHYT

SEQ ID NO: 121 - protein, 672 aa, Severe acute respiratory syndrome-related coronavirus
QCVNLTTRTQLPPAYTNSFTRGVYYPDKVFRSSVLHSTQDLFLPFFSNVTWFHAIHVSGTNGTKRFDNPVLPFNDGVYFASTEKSNIIRGWIFGTTLDSKTQSLLIVNNATNVVIKVCEFQFCNDPFLGVYYHKNNKSWMESEFRVYSSANNCTFEYVSQPFLMDLEGKQGNFKNLREFVFKNIDGYFKIYSKHTPINLVRDLPQGFSALEPLVDLPIGINITRFQTLLALHRSYLTPGDSSSGWTAGAAAYYVGYLQPRTFLLKYNENGTITDAVDCALDPLSETKCTLKSFTVEKGIYQTSNFRVQPTESIVRFPNITNLCPFGEVFNATRFASVYAWNRKRISNCVADYSVLYNSASFSTFKCYGVSPTKLNDLCFTNVYADSFVIRGDEVRQIAPGQTGKIADYNYKLPDDFTGCVIAWNSNNLDSKVGGNYNYLYRLFRKSNLKPFERDISTEIYQAGSTPCNGVEGFNCYFPLQSYGFQPTNGVGYQPYRVVVLSFELLHAPATVCGPKKSTNLVKNKCVNFNFNGLTGTGVLTESNKKFLPFQQFGRDIADTTDAVRDPQTLEILDITPCSFGGVSVITPGTNTSNQVAVLYQDVNCTEVPVAIHADQLTPTWRVYSTGSNVFQTRAGCLIGAEHVNNSYECDIPIGAGICASYQTQTNSPRRAR

SEQ ID NO: 122 - protein, 140 aa, Severe acute respiratory syndrome-related coronavirus
NFNGLTGTGVLTESNKKFLPFQQFGRDIADTTDAVRDPQTLEILDITPCSFGGVSVITPGTNTSNQVAVLYQDVNCTEVPVAIHADQLTPTWRVYSTGSNVFQTRAGCLIGAEHVNNSYECDIPIGAGICASYQTQTNSP

SEQ ID NO: 123 - protein, 24 aa, Severe acute respiratory syndrome-related coronavirus
WYIWLGFIAGLIAIVMVTIMLCCM

SEQ ID NO: 124 - protein, 36 aa, Severe acute respiratory syndrome-related coronavirus
TSCCSCLKGCCSCGSCCKFDEDDSEPVLKGVKLHYT

SEQ ID NO: 125 - protein, 51 aa, Severe acute respiratory syndrome-related coronavirus
DVDLGDISGINASVVNIQKEIDRLNEVAKNLNESLIDLQELGKYEQYIKWP

SEQ ID NO: 126 - protein, 197 aa, Severe acute respiratory syndrome-related coronavirus
NITNLCPFGEVFNATRFASVYAWNRKRISNCVADYSVLYNSASFSTFKCYGVSPTKLNDLCFTNVYADSFVIRGDEVRQIAPGQTGKIADYNYKLPDDFTGCVIAWNSNNLDSKVGGNYNYLYRLFRKSNLKPFERDISTEIYQAGSTPCNGVEGFNCYFPLQSYGFQPTNGVGYQPYRVVVLSFELLHAPATVCGP

SEQ ID NO: 127 - skipped

SEQ ID NO: 128 - protein, 4 aa, synthetic construct
  REGION 1..4: note = inactivated furin cleavage site
GGGG

SEQ ID NO: 129 - protein, 5 aa, synthetic construct
  REGION 1..5: note = inactivated furin cleavage site
GGGGG

SEQ ID NO: 130 - protein, 1272 aa, synthetic construct
  REGION 1..1272: note = modified coronavirus S polypeptide
MFVFLVLLPLVSSQCVNLTTRTQLPPAYTNSFTRGVYYPDKVFRSSVLHSTQDLFLPFFSNVTWFHAIHVSGTNGTKRFANPVLPFNDGVYFASTEKSNIIRGWIFGTTLDSKTQSLLIVNNATNVVIKVCEFQFCNDPFLGVYYHKNNKSWMESEFRVYSSANNCTFEYVSQPFLMDLEGKQGNFKNLREFVFKNIDGYFKIYSKHTPINLVRGLPQGFSALEPLVDLPIGINITRFQTLHALHRSYLTPGDSSSGWTAGAAAYYVGYLQPRTFLLKYNENGTITDAVDCALDPLSETKCTLKSFTVEKGIYQTSNFRVQPTESIVRFPNITNLCPFGEVFNATRFASVYAWNRKRISNCVADYSVLYNSASFSTFKCYGVSPTKLNDLCFTNVYADSFVIRGDEVRQIAPGQTGNIADYNYKLPDDFTGCVIAWNSNNLDSKVGGNYNYLYRLFRKSNLKPFERDISTEIYQAGSTPCNGVKGFNCYFPLQSYGFQPTYGVGYQPYRVVVLSFELLHAPATVCGPKKSTNLVKNKCVNFNFNGLTGTGVLTESNKKFLPFQQFGRDIADTTDAVRDPQTLEILDITPCSFGGVSVITPGTNTSNQVAVLYQGVNCTEVPVAIHADQLTPTWRVYSTGSNVFQTRAGCLIGAEHVNNSYECDIPIGAGICASYQTQTNSPQQAQSVASQSIIAYTMSLGVENSVAYSNNSIAIPTNFTISVTTEILPVSMTKTSVDCTMYICGDSTECSNLLLQYGSFCTQLNRALTGIAVEQDKNTQEVFAQVKQIYKTPPIKDFGGNFSQILPDPSKPSKRSFIEDLLFNKVTLADAGFIKQYGDCLGDIAARDLICAQKFNGLTVLPPLLTDEMIAQYTSALLAGTITSGWTFGAGAALQIPFAMQMAYRFNGIGVTQNVLYENQKLIANQFNSAIGKIQDSLSSTASALGKLQDVVNQNAQALNTLVKQLSSNFGAISSVLNDILSRLDPPEAEVQIDRLITGRLQSLQTYVTQQLIRAAEIRASANLAATKMSECVLGQSKRVDFCGKGYHLMSFPQSAPHGVVFLHVTYVPAQEKNFTTAPAICHDGKAHFPREGVFVSNGTHWFVTQRNFYEPQIITTDNTFVSGNCDVVIGIVNNTVYDPLQPELDSFKEELDKYFKNHTSPDVDLGDISGINASVVNIQKEIDRLNEVAKNLNESLIDLQELGKYEQYIKWPWYIWLGFIAGLIAIVMVTIMLCCMTSCCSCLKGCCSCGSCCKFDEDDSEPVLKGVKLHYT

SEQ ID NO: 131 - DNA, 3822 bp, synthetic construct
  misc_feature 1..3822: note = modified coronavirus S polypeptide
  source 1..3822: mol_type = other DNA
atgttcgtcttcctggtgctgctgcctctggtgtccagccagtgcgtgaacctgaccactaggactcagctgcctcccgcttacaccaactcattcactaggggtgtgtactacccagacaaggtcttccgctcctcagtgctgcactcaactcaggacctgttcctgcctttcttctccaacgtcacctggttccacgctatccacgtgtccggcaccaacggcactaagaggttcgccaaccccgtgctgccattcaacgacggagtctacttcgcttcaaccgagaagtccaacatcatcagaggatggatcttcggcaccactctggacagcaagactcagtctctgctgatcgtcaacaacgctaccaacgtggtcatcaaggtgtgcgaattccagttctgtaacgaccccttcctgggtgtctactaccacaagaacaacaagtcatggatggagtccgaattccgcgtctactccagcgctaacaactgcactttcgagtacgtgtcccagccattcctgatggacctggaaggaaagcagggtaacttcaagaacctgcgcgagttcgtgttcaagaacatcgacggctacttcaagatttacagcaagcacacccccatcaacctggtccgtggcctgccacagggattctctgctctggagcccctggtggacctgccaatcggcatcaacatcaccaggttccagactctgcacgccctgcacagatcctacctgactcccggagactcttcatccggttggaccgctggcgctgccgcttactacgtgggttacctgcagccacgcaccttcctgctgaagtacaacgaaaacggcaccatcactgacgccgtcgactgcgctctggacccactgtcagaaaccaagtgcactctgaagtccttcaccgtggagaagggaatctaccagacttcaaacttccgcgtgcagcctaccgaatccatcgtccgtttcccaaacatcactaacctgtgccctttcggagaggtcttcaacgccacccgcttcgcttccgtgtacgcctggaaccgcaagcgtatctcaaactgcgtcgctgactactccgtgctgtacaactcagcctccttcagcaccttcaagtgctacggagtgtcacccactaagctgaacgacctgtgcttcaccaacgtctacgctgactccttcgtgatccgcggtgacgaggtccgtcagatcgctccaggccagactggaaacatcgccgactacaactacaagctgcctgacgacttcaccggttgcgtcatcgcctggaacagcaacaacctggactctaaagtgggtggcaactacaactacctgtacaggctgttcagaaagtcaaacctgaagcccttcgagcgcgacatcagcactgaaatctaccaggctggttctaccccatgcaacggtgtcaagggcttcaactgctacttccctctgcagtcctacggcttccagcccacttacggtgtgggctaccagccataccgtgtggtcgtgctgagcttcgagctgctgcacgcccctgctactgtgtgcggacccaagaagtctaccaacctggtcaagaacaagtgcgtgaacttcaacttcaacggtctgaccggaactggtgtcctgaccgagagcaacaagaagttcctgcctttccagcagttcggtcgcgacatcgctgacaccactgacgccgtgcgtgaccctcagaccctggaaatcctggacatcactccctgctcattcggaggtgtctccgtgatcactcccggaaccaacacttctaaccaggtcgctgtgctgtaccagggtgtgaactgcaccgaagtcccagtggccatccacgctgaccagctgacccctacttggagggtgtactccaccggcagcaacgtcttccagactagagctggatgcctgatcggtgccgagcacgtcaacaacagctacgaatgcgacatccctatcggcgctggaatctgcgcctcttaccagacccagactaacagcccccagcaggctcagtctgtggcctctcagtcaatcatcgcctacaccatgtcactgggtgtcgaaaactccgtggcttactctaacaactcaatcgccatccctaccaacttcactatcagcgtgaccactgagatcctgcccgtcagcatgaccaagacttctgtggactgcactatgtacatctgcggcgacagcaccgaatgctctaacctgctgctgcagtacggttctttctgcacccagctgaaccgcgctctgactggcatcgccgtggagcaggacaagaacactcaggaagtcttcgctcaggtgaagcaaatctacaagaccccacctatcaaggacttcggcggattcaacttctcccagatcctgccagacccttccaagcccagcaagaggtctttcatcgaggacctgctgttcaacaaggtcactctggccgacgctggtttcatcaagcagtacggcgactgcctgggagacatcgctgctcgcgacctgatctgcgcccagaagttcaacggcctgaccgtgctgcccccactgctgactgacgaaatgatcgctcagtacactagcgccctgctggctggcaccatcacttcaggttggactttcggtgctggtgctgctctgcagatcccattcgctatgcagatggcctaccgtttcaacggaatcggtgtcacccagaacgtgctgtacgagaaccagaagctgatcgctaaccagttcaactcagccatcggcaagatccaggacagcctgagctctactgcctctgctctgggaaagctgcaggacgtcgtgaaccagaacgcccaggctctgaacaccctggtcaagcagctgtcatccaacttcggcgccatcagctctgtgctgaacgacatcctgtccaggctggaccctcccgaggctgaagtccagatcgacaggctgatcactggaagactgcagtcactgcagacctacgtgactcagcagctgatccgcgccgctgaaatccgtgcctccgctaacctggccgctaccaagatgagcgagtgcgtcctgggccagtctaagagagtggacttctgcggcaagggataccacctgatgtcattcccacagtccgcccctcacggagtcgtgttcctgcacgtcacctacgtgcccgctcaggagaagaacttcaccactgccccagctatctgccacgacggcaaggctcacttccctcgcgaaggagtcttcgtgagcaacggcacccactggttcgtcactcagcgtaacttctacgagccccagatcatcaccactgacaacactttcgtgtctggcaactgcgacgtggtcatcggtatcgtcaacaacaccgtgtacgaccctctgcagcccgagctggactcattcaaggaagagctggacaagtacttcaagaaccacacctcccctgacgtcgacctgggtgacatctcaggcatcaacgcctccgtcgtgaacatccagaaggagatcgaccgcctgaacgaagtggctaagaacctgaacgaaagcctgatcgacctgcaggagctgggcaagtacgaacagtacatcaagtggccatggtacatctggctgggattcatcgctggcctcatcgctatcgtgatggtgaccatcatgctgtgctgcatgacttcatgctgctcctgcctgaagggttgctgcagctgcggctcttgctgcaagttcgacgaggacgactctgaacctgtcctgaagggagtgaagctgcactacacctaa

SEQ ID NO: 132 - protein, 1259 aa, synthetic construct
  REGION 1..1259: note = modified coronavirus S polypeptide
QCVNLTTRTQLPPAYTNSFTRGVYYPDKVFRSSVLHSTQDLFLPFFSNVTWFHAIHVSGTNGTKRFANPVLPFNDGVYFASTEKSNIIRGWIFGTTLDSKTQSLLIVNNATNVVIKVCEFQFCNDPFLGVYYHKNNKSWMESEFRVYSSANNCTFEYVSQPFLMDLEGKQGNFKNLREFVFKNIDGYFKIYSKHTPINLVRGLPQGFSALEPLVDLPIGINITRFQTLHALHRSYLTPGDSSSGWTAGAAAYYVGYLQPRTFLLKYNENGTITDAVDCALDPLSETKCTLKSFTVEKGIYQTSNFRVQPTESIVRFPNITNLCPFGEVFNATRFASVYAWNRKRISNCVADYSVLYNSASFSTFKCYGVSPTKLNDLCFTNVYADSFVIRGDEVRQIAPGQTGNIADYNYKLPDDFTGCVIAWNSNNLDSKVGGNYNYLYRLFRKSNLKPFERDISTEIYQAGSTPCNGVKGFNCYFPLQSYGFQPTYGVGYQPYRVVVLSFELLHAPATVCGPKKSTNLVKNKCVNFNFNGLTGTGVLTESNKKFLPFQQFGRDIADTTDAVRDPQTLEILDITPCSFGGVSVITPGTNTSNQVAVLYQGVNCTEVPVAIHADQLTPTWRVYSTGSNVFQTRAGCLIGAEHVNNSYECDIPIGAGICASYQTQTNSPQQAQSVASQSIIAYTMSLGVENSVAYSNNSIAIPTNFTISVTTEILPVSMTKTSVDCTMYICGDSTECSNLLLQYGSFCTQLNRALTGIAVEQDKNTQEVFAQVKQIYKTPPIKDFGGNFSQILPDPSKPSKRSFIEDLLFNKVTLADAGFIKQYGDCLGDIAARDLICAQKFNGLTVLPPLLTDEMIAQYTSALLAGTITSGWTFGAGAALQIPFAMQMAYRFNGIGVTQNVLYENQKLIANQFNSAIGKIQDSLSSTASALGKLQDVVNQNAQALNTLVKQLSSNFGAISSVLNDILSRLDPPEAEVQIDRLITGRLQSLQTYVTQQLIRAAEIRASANLAATKMSECVLGQSKRVDFCGKGYHLMSFPQSAPHGVVFLHVTYVPAQEKNFTTAPAICHDGKAHFPREGVFVSNGTHWFVTQRNFYEPQIITTDNTFVSGNCDVVIGIVNNTVYDPLQPELDSFKEELDKYFKNHTSPDVDLGDISGINASVVNIQKEIDRLNEVAKNLNESLIDLQELGKYEQYIKWPWYIWLGFIAGLIAIVMVTIMLCCMTSCCSCLKGCCSCGSCCKFDEDDSEPVLKGVKLHYT

SEQ ID NO: 133 - protein, 1258 aa, synthetic construct
  REGION 1..1258: note = modified coronavirus S polypeptide
QCVNLTTRTQLPPAYTNSFTRGVYYPDKVFRSSVLHSTQDLFLPFFSNVTWFHAIHVSGTNGTKRFDNPVLPFNDGVYFASTEKSNIIRGWIFGTTLDSKTQSLLIVNNATNVVIKVCEFQFCNDPFLGVYYHKNNKSWMESEFRVYSSANNCTFEYVSQPFLMDLEGKQGNFKNLREFVFKNIDGYFKIYSKHTPINLVRDLPQGFSALEPLVDLPIGINITRFQTLLALHRSYLTPGDSSSGWTAGAAAYYVGYLQPRTFLLKYNENGTITDAVDCALDPLSETKCTLKSFTVEKGIYQTSNFRVQPTESIVRFPNITNLCPFGEVFNATRFASVYAWNRKRISNCVADYSVLYNSASFSTFKCYGVSPTKLNDLCFTNVYADSFVIRGDEVRQIAPGQTGKIADYNYKLPDDFTGCVIAWNSNNLDSKVGGNYNYLYRLFRKSNLKPFERDISTEIYQAGSTPCNGVEGFNCYFPLQSYGFQPTNGVGYQPYRVVVLSFELLHAPATVCGPKKSTNLVKNKCVNFNFNGLTGTGVLTESNKKFLPFQQFGRDIADTTDAVRDPQTLEILDITPCSFGGVSVITPGTNTSNQVAVLYQGVNCTEVPVAIHADQLTPTWRVYSTGSNVFQTRAGCLIGAEHVNNSYECDIPIGAGICASYQTQTNSPGGSVASQSIIAYTMSLGAENSVAYSNNSIAIPTNFTISVTTEILPVSMTKTSVDCTMYICGDSTECSNLLLQYGSFCTQLNRALTGIAVEQDKNTQEVFAQVKQIYKTPPIKDFGGFNFSQILPDPSKPSKRSFIEDLLFNKVTLADAGFIKQYGDCLGDIAARDLICAQKFNGLTVLPPLLTDEMIAQYTSALLAGTITSGWTFGAGAALQIPFAMQMAYRFNGIGVTQNVLYENQKLIANQFNSAIGKIQDSLSSTASALGKLQDVVNQNAQALNTLVKQLSSNFGAISSVLNDILSRLDPPEAEVQIDRLITGRLQSLQTYVTQQLIRAAEIRASANLAATKMSECVLGQSKRVDFCGKGYHLMSFPQSAPHGVVFLHVTYVPAQEKNFTTAPAICHDGKAHFPREGVFVSNGTHWFVTQRNFYEPQIITTDNTFVSGNCDVVIGIVNNTVYDPLQPELDSFKEELDKYFKNHTSPDVDLGDISGINASVVNIQKEIDRLNEVAKNLNESLIDLQELGKYEQYIKWPWYIWLGFIAGLIAIVMVTIMLCCMTSCCSCLKGCCSCGSCCKFDEDDSEPVLKGVKLHYT

SEQ ID NO: 134 - protein, 1271 aa, synthetic construct
  REGION 1..1271: note = modified coronavirus S polypeptide
MFVFLVLLPLVSSQCVNLTTRTQLPPAYTNSFTRGVYYPDKVFRSSVLHSTQDLFLPFFSNVTWFHAIHVSGTNGTKRFDNPVLPFNDGVYFASTEKSNIIRGWIFGTTLDSKTQSLLIVNNATNVVIKVCEFQFCNDPFLGVYYHKNNKSWMESEFRVYSSANNCTFEYVSQPFLMDLEGKQGNFKNLREFVFKNIDGYFKIYSKHTPINLVRDLPQGFSALEPLVDLPIGINITRFQTLLALHRSYLTPGDSSSGWTAGAAAYYVGYLQPRTFLLKYNENGTITDAVDCALDPLSETKCTLKSFTVEKGIYQTSNFRVQPTESIVRFPNITNLCPFGEVFNATRFASVYAWNRKRISNCVADYSVLYNSASFSTFKCYGVSPTKLNDLCFTNVYADSFVIRGDEVRQIAPGQTGKIADYNYKLPDDFTGCVIAWNSNNLDSKVGGNYNYLYRLFRKSNLKPFERDISTEIYQAGSTPCNGVEGFNCYFPLQSYGFQPTNGVGYQPYRVVVLSFELLHAPATVCGPKKSTNLVKNKCVNFNFNGLTGTGVLTESNKKFLPFQQFGRDIADTTDAVRDPQTLEILDITPCSFGGVSVITPGTNTSNQVAVLYQGVNCTEVPVAIHADQLTPTWRVYSTGSNVFQTRAGCLIGAEHVNNSYECDIPIGAGICASYQTQTNSPGGSVASQSIIAYTMSLGAENSVAYSNNSIAIPTNFTISVTTEILPVSMTKTSVDCTMYICGDSTECSNLLLQYGSFCTQLNRALTGIAVEQDKNTQEVFAQVKQIYKTPPIKDFGGFNFSQILPDPSKPSKRSFIEDLLFNKVTLADAGFIKQYGDCLGDIAARDLICAQKFNGLTVLPPLLTDEMIAQYTSALLAGTITSGWTFGAGAALQIPFAMQMAYRFNGIGVTQNVLYENQKLIANQFNSAIGKIQDSLSSTASALGKLQDVVNQNAQALNTLVKQLSSNFGAISSVLNDILSRLDPPEAEVQIDRLITGRLQSLQTYVTQQLIRAAEIRASANLAATKMSECVLGQSKRVDFCGKGYHLMSFPQSAPHGVVFLHVTYVPAQEKNFTTAPAICHDGKAHFPREGVFVSNGTHWFVTQRNFYEPQIITTDNTFVSGNCDVVIGIVNNTVYDPLQPELDSFKEELDKYFKNHTSPDVDLGDISGINASVVNIQKEIDRLNEVAKNLNESLIDLQELGKYEQYIKWPWYIWLGFIAGLIAIVMVTIMLCCMTSCCSCLKGCCSCGSCCKFDEDDSEPVLKGVKLHYT

SEQ ID NO: 135 - protein, 3813 aa, synthetic construct
  REGION 1..3813: note = modified coronavirus S polypeptide
ATGTTCGTCTTCCTGGTGCTGCTGCCTCTGGTGTCCAGCCAGTGCGTGAACCTGACCACTAGGACTCAGCTGCCTCCCGCTTACACCAACAGCTTCACTAGGGGTGTCTACTACCCTGACAAGGTCTTCCGCTCCTCAGTGCTGCACTCTACTCAGGACCTGTTCCTGCCCTTCTTCTCAAACGTGACCTGGTTCCACGCCATCTCCGGCACCAACGGCACTAAGAGGTTCGACAACCCCGTGCTGCCATTCAACGACGGCGTCTACTTCGCTTCAACCGAGAAGTCCAACATCATCAGAGGATGGATCTTCGGCACCACTCTGGACAGCAAGACTCAGTCTCTGCTGATCGTCAACAACGCCACCAACGTGGTCATCAAGGTGTGCGAATTCCAGTTCTGCAACGACCCATTCCTGGGTGTGTACCACAAGAACAACAAGTCATGGATGGAGTCCGAATTCCGCGTCTACTCCAGCGCTAACAACTGCACTTTCGAGTACGTGAGCCAGCCTTTCCTGATGGACCTGGAAGGAAAGCAGGGTAACTTCAAGAACCTGCGCGAGTTCGTGTTCAAGAACATCGACGGATACTTCAAGATTTACAGCAAGCACACCCCCATCAACCTGGTCCGTGACCTGCCACAGGGTTTCTCTGCTCTGGAGCCCCTGGTGGACCTGCCAATCGGCATCAACATCACCAGGTTCCAGACTCTGCTGGCTCTGCACCGCTCCTACCTGACTCCAGGTGACTCATCTTCTGGATGGACTGCTGGAGCTGCTGCTTACTACGTGGGTTACCTGCAGCCTCGCACCTTCCTGCTGAAGTACAACGAAAACGGCACCATCACTGACGCCGTCGACTGCGCTCTGGACCCTCTGTCAGAAACCAAGTGCACTCTGAAGTCCTTCACCGTGGAGAAGGGTATCTACCAGACTAGCAACTTCCGCGTGCAGCCCACCGAATCTATCGTCCGTTTCCCAAACATCACTAACCTGTGCCCTTTCGGCGAGGTCTTCAACGCCACCCGCTTCGCTTCCGTGTACGCCTGGAACCGCAAGCGTATCTCAAACTGCGTCGCTGACTACTCCGTGCTGTACAACTCAGCCTCCTTCAGCACCTTCAAGTGCTACGGTGTGTCACCCACTAAGCTGAACGACCTGTGCTTCACCAACGTCTACGCCGACTCCTTCGTGATCCGCGGCGACGAGGTCCGTCAGATCGCTCCAGGCCAGACTGGAAAGATCGCCGACTACAACTACAAGCTGCCTGACGACTTCACCGGCTGCGTCATCGCTTGGAACAGCAACAACCTGGACTCTAAAGTGGGTGGCAACTACAACTACCTGTACAGGCTGTTCAGAAAGAGCAACCTGAAGCCCTTCGAGCGCGACATCAGCACTGAAATCTACCAGGCTGGCTCTACCCCATGCAACGGTGTCGAGGGCTTCAACTGCTACTTCCCTCTGCAGTCTTACGGATTCCAGCCCACTTACGGTGTGGGCTACCAGCCATACCGTGTGGTCGTGCTGAGCTTCGAACTGCTGCACGCCCCTGCTACTGTGTGCGGACCCAAGAAGTCTACCAACCTGGTCAAGAACAAGTGCGTGAACTTCAACTTCAACGGTCTGACCGGAACTGGTGTCCTGACCGAGAGCAACAAGAAGTTCCTGCCCTTCCAGCAGTTCGGTCGCGACATCGACGACACCACTGACGCCGTGCGTGACCCTCAGACCCTGGAAATCCTGGACATCACTCCCTGCTCATTCGGAGGTGTCTCCGTGATCACTCCAGGAACCAACACTTCTAACCAGGTCGCTGTGCTGTACCAGGGTGTCAACTGCACCGAGGTCCCAGTGGCCATCCACGCTGACCAGCTGACCCCTACTTGGAGGGTGTACTCCACCGGCAGCAACGTGTTCCAGACTAGAGCTGGTTGCCTGATCGGCGCCGAGCACGTGAACAACAGCTACGAATGCGACATCCCAATCGGCGCTGGAATCTGCGCCTCTTACCAGACCCAGACTAACAGCCACCAGCAGGCTCAGTCTGTCGCCTCTCAGTCAATCATCGCTTACACTATGTCACTGGGCGCTGAAAACTCCGTGGCCTACTCTAACAACTCAATCGCCATCCCTATCAACTTCACCATCTCAGTGACCACTGAGATCCTGCCCGTCAGCATGACCAAGACTTCTGTGGACTGCACTATGTACATCTGCGGAGACAGCACCGAATGCTCTAACCTGCTGCTGCAGTACGGCTCCTTCTGCACCCAGCTGAACCGCGCTCTGACTGGAATCGCCGTGGAGCAGGACAAGAACACTCAGGAAGTCTTCGCTCAGGTGAAGCAAATCTACAAGACCCCACCTATCAAGGACTTCGGCGGATTCAACTTCTCCCAGATCCTGCCAGACCCTTCCAAGCCAAGCAAGAGGTCTTTCATCGAGGACCTGCTGTTCAACAAGGTCACCCTGGCCGACGCTGGCTTCATCAAGCAGTACGGAGACTGCCTGGGTGACATCGCCGCTCGCGACCTGATCTGCGCTCAGAAGTTCAACGGACTGACCGTGCTGCCCCCACTGCTGACTGACGAAATGATCGCCCAGTACACTTCAGCCCTGCTGGCTGGAACCATCACTTCTGGTTGGACCTTCGGTGCTGGTGCTGCTCTGCAGATCCCTTTCGCTATGCAGATGGCCTACCGTTTCAACGGAATCGGTGTCACCCAGAACGTGCTGTACGAGAACCAGAAGCTGATCGCTAACCAGTTCAACTCCGCCATCGGCAAGATCCAGGACAGCCTGAGCTCTACTGCCTCTGCTCTGGGAAAGCTGCAGGACGTCGTGAACCAGAACGCCCAGGCTCTGAACACCCTGGTCAAGCAGCTGTCATCCAACTTCGGAGCCATCAGCTCTGTGCTGAACGACATCCTCGCTAGGCTGGACCCTCCCGAGGCTGAAGTCCAGATCGACAGGCTGATCACTGGTAGACTGCAGTCACTGCAGACCTACGTGACTCAGCAGCTGATCCGCGCCGCTGAAATCCGTGCCTCCGCTAACCTGGCCGCTACCAAGATGAGCGAGTGCGTCCTGGGACAGTCTAAGAGAGTGGACTTCTGCGGCAAGGGATACCACCTGATGTCATTCCCACAGTCCGCTCCTCACGGTGTCGTGTTCCTGCACGTCACCTACGTGCCCGCCCAGGAGAAGAACTTCACCACTGCCCCAGCTATCTGCCACGACGGCAAGGCTCACTTCCCCCGCGAAGGTGTCTTCGTGTCAAACGGCACCCACTGGTTCGTCACTCAGCGTAACTTCTACGAGCCACAGATCATCACCACTCACAACACTTTCGTGTCCGGAAACTGCGACGTGGTCATCGGTATCGTCAACAACACCGTGTACGACCCTCTGCAGCCCGAGCTGGACTCATTCAAGGAAGAGCTGGACAAGTACTTCAAGAACCACACCTCCCCTGACGTCGACCTGGGCGACATCTCAGGAATCAACGCTTCCGTCGTGAACATCCAGAAGGAGATCGACCGCCTGAACGAAGTGGCCAAGAACCTGAACGAATCACTGATCGACCTGCAGGAGCTGGGCAAGTACGAACAGTACATCAAGTGGCCTTGGTACATCTGGCTGGGTTTCATCGCTGGCCTCATCGCTATCGTGATGGTGACCATCATGCTGTGCTGCATGACTTCATGCTGCTCCTGCCTGAAGGGCTGCTGCAGCTGCGGATCTTGCTGCAAGTTCGACGAGGACGACTCCGAACCCGTCCTGAAGGGAGTGAAGCTGCACTACACCTAA

SEQ ID NO: 136 - protein, 1270 aa, synthetic construct
  REGION 1..1270: note = modified coronavirus S polypeptide
MFVFLVLLPLVSSQCVNLTTRTQLPPAYTNSFTRGVYYPDKVFRSSVLHSTQDLFLPFFSNVTWFHAISGTNGTKRFDNPVLPFNDGVYFASTEKSNIIRGWIFGTTLDSKTQSLLIVNNATNVVIKVCEFQFCNDPFLGVYHKNNKSWMESEFRVYSSANNCTFEYVSQPFLMDLEGKQGNFKNLREFVFKNIDGYFKIYSKHTPINLVRDLPQGFSALEPLVDLPIGINITRFQTLLALHRSYLTPGDSSSGWTAGAAAYYVGYLQPRTFLLKYNENGTITDAVDCALDPLSETKCTLKSFTVEKGIYQTSNFRVQPTESIVRFPNITNLCPFGEVFNATRFASVYAWNRKRISNCVADYSVLYNSASFSTFKCYGVSPTKLNDLCFTNVYADSFVIRGDEVRQIAPGQTGKIADYNYKLPDDFTGCVIAWNSNNLDSKVGGNYNYLYRLFRKSNLKPFERDISTEIYQAGSTPCNGVEGFNCYFPLQSYGFQPTYGVGYQPYRVVVLSFELLHAPATVCGPKKSTNLVKNKCVNFNFNGLTGTGVLTESNKKFLPFQQFGRDIDDTTDAVRDPQTLEILDITPCSFGGVSVITPGTNTSNQVAVLYQGVNCTEVPVAIHADQLTPTWRVYSTGSNVFQTRAGCLIGAEHVNNSYECDIPIGAGICASYQTQTNSHQQAQSVASQSIIAYTMSLGAENSVAYSNNSIAIPINFTISVTTEILPVSMTKTSVDCTMYICGDSTECSNLLLQYGSFCTQLNRALTGIAVEQDKNTQEVFAQVKQIYKTPPIKDFGGFNFSQILPDPSKPSKRSFIEDLLFNKVTLADAGFIKQYGDCLGDIAARDLICAQKFNGLTVLPPLLTDEMIAQYTSALLAGTITSGWTFGAGAALQIPFAMQMAYRFNGIGVTQNVLYENQKLIANQFNSAIGKIQDSLSSTASALGKLQDVVNQNAQALNTLVKQLSSNFGAISSVLNDILARLDPPEAEVQIDRLITGRLQSLQTYVTQQLIRAAEIRASANLAATKMSECVLGQSKRVDFCGKGYHLMSFPQSAPHGVVFLHVTYVPAQEKNFTTAPAICHDGKAHFPREGVFVSNGTHWFVTQRNFYEPQIITTHNTFVSGNCDVVIGIVNNTVYDPLQPELDSFKEELDKYFKNHTSPDVDLGDISGINASVVNIQKEIDRLNEVAKNLNESLIDLQELGKYEQYIKWPWYIWLGFIAGLIAIVMVTIMLCCMTSCCSCLKGCCSCGSCCKFDEDDSEPVLKGVKLHYT

SEQ ID NO: 137 - protein, 1268 aa, synthetic construct
  REGION 1..1268: note = modified coronavirus S polypeptide
MFVFLVLLPLVSSQCVNLTTRTQLPPAYTNSFTRGVYYPDKVFRSSVLHSTQDLFLPFFSNVTWFHAISGTNGTKRFDNPVLPFNDGVYFASTEKSNIIRGWIFGTTLDSKTQSLLIVNNATNVVIKVCEFQFCNDPFLGVYHKNNKSWMESEFRVYSSANNCTFEYVSQPFLMDLEGKQGNFKNLREFVFKNIDGYFKIYSKHTPINLVRDLPQGFSALEPLVDLPIGINITRFQTLLALHRSYLTPGDSSSGWTAGAAAYYVGYLQPRTFLLKYNENGTITDAVDCALDPLSETKCTLKSFTVEKGIYQTSNFRVQPTESIVRFPNITNLCPFGEVFNATRFASVYAWNRKRISNCVADYSVLYNSASFSTFKCYGVSPTKLNDLCFTNVYADSFVIRGDEVRQIAPGQTGKIADYNYKLPDDFTGCVIAWNSNNLDSKVGGNYNYLYRLFRKSNLKPFERDISTEIYQAGSTPCNGVEGFNCYFPLQSYGFQPTYGVGYQPYRVVVLSFELLHAPATVCGPKKSTNLVKNKCVNFNFNGLTGTGVLTESNKKFLPFQQFGRDIDDTTDAVRDPQTLEILDITPCSFGGVSVITPGTNTSNQVAVLYQGVNCTEVPVAIHADQLTPTWRVYSTGSNVFQTRAGCLIGAEHVNNSYECDIPIGAGICASYQTQTNSHGGSVASQSIIAYTMSLGAENSVAYSNNSIAIPINFTISVTTEILPVSMTKTSVDCTMYICGDSTECSNLLLQYGSFCTQLNRALTGIAVEQDKNTQEVFAQVKQIYKTPPIKDFGGFNFSQILPDPSKPSKRSFIEDLLFNKVTLADAGFIKQYGDCLGDIAARDLICAQKFNGLTVLPPLLTDEMIAQYTSALLAGTITSGWTFGAGAALQIPFAMQMAYRFNGIGVTQNVLYENQKLIANQFNSAIGKIQDSLSSTASALGKLQDVVNQNAQALNTLVKQLSSNFGAISSVLNDILARLDPPEAEVQIDRLITGRLQSLQTYVTQQLIRAAEIRASANLAATKMSECVLGQSKRVDFCGKGYHLMSFPQSAPHGVVFLHVTYVPAQEKNFTTAPAICHDGKAHFPREGVFVSNGTHWFVTQRNFYEPQIITTHNTFVSGNCDVVIGIVNNTVYDPLQPELDSFKEELDKYFKNHTSPDVDLGDISGINASVVNIQKEIDRLNEVAKNLNESLIDLQELGKYEQYIKWPWYIWLGFIAGLIAIVMVTIMLCCMTSCCSCLKGCCSCGSCCKFDEDDSEPVLKGVKLHYT

SEQ ID NO: 138 - protein, 1255 aa, synthetic construct
  REGION 1..1255: note = modified coronavirus S polypeptide
QCVNLTTRTQLPPAYTNSFTRGVYYPDKVFRSSVLHSTQDLFLPFFSNVTWFHAISGTNGTKRFDNPVLPFNDGVYFASTEKSNIIRGWIFGTTLDSKTQSLLIVNNATNVVIKVCEFQFCNDPFLGVYHKNNKSWMESEFRVYSSANNCTFEYVSQPFLMDLEGKQGNFKNLREFVFKNIDGYFKIYSKHTPINLVRDLPQGFSALEPLVDLPIGINITRFQTLLALHRSYLTPGDSSSGWTAGAAAYYVGYLQPRTFLLKYNENGTITDAVDCALDPLSETKCTLKSFTVEKGIYQTSNFRVQPTESIVRFPNITNLCPFGEVFNATRFASVYAWNRKRISNCVADYSVLYNSASFSTFKCYGVSPTKLNDLCFTNVYADSFVIRGDEVRQIAPGQTGKIADYNYKLPDDFTGCVIAWNSNNLDSKVGGNYNYLYRLFRKSNLKPFERDISTEIYQAGSTPCNGVEGFNCYFPLQSYGFQPTYGVGYQPYRVVVLSFELLHAPATVCGPKKSTNLVKNKCVNFNFNGLTGTGVLTESNKKFLPFQQFGRDIDDTTDAVRDPQTLEILDITPCSFGGVSVITPGTNTSNQVAVLYQGVNCTEVPVAIHADQLTPTWRVYSTGSNVFQTRAGCLIGAEHVNNSYECDIPIGAGICASYQTQTNSHGGSVASQSIIAYTMSLGAENSVAYSNNSIAIPINFTISVTTEILPVSMTKTSVDCTMYICGDSTECSNLLLQYGSFCTQLNRALTGIAVEQDKNTQEVFAQVKQIYKTPPIKDFGGFNFSQILPDPSKPSKRSFIEDLLFNKVTLADAGFIKQYGDCLGDIAARDLICAQKFNGLTVLPPLLTDEMIAQYTSALLAGTITSGWTFGAGAALQIPFAMQMAYRFNGIGVTQNVLYENQKLIANQFNSAIGKIQDSLSSTASALGKLQDVVNQNAQALNTLVKQLSSNFGAISSVLNDILARLDPPEAEVQIDRLITGRLQSLQTYVTQQLIRAAEIRASANLAATKMSECVLGQSKRVDFCGKGYHLMSFPQSAPHGVVFLHVTYVPAQEKNFTTAPAICHDGKAHFPREGVFVSNGTHWFVTQRNFYEPQIITTHNTFVSGNCDVVIGIVNNTVYDPLQPELDSFKEELDKYFKNHTSPDVDLGDISGINASVVNIQKEIDRLNEVAKNLNESLIDLQELGKYEQYIKWPWYIWLGFIAGLIAIVMVTIMLCCMTSCCSCLKGCCSCGSCCKFDEDDSEPVLKGVKLHYT

SEQ ID NO: 139 - DNA, 3807 bp, synthetic construct
  misc_feature 1..3807: note = modified coronavirus S polypeptide
  source 1..3807: mol_type = other DNA
atgttcgtcttcctggtgctgctgcctctggtgtccagccagtgcgtgaacctgaccactaggactcagctgcctcccgcttacaccaacagcttcactaggggtgtctactaccctgacaaggtcttccgctcctcagtgctgcactctactcaggacctgttcctgcccttcttctcaaacgtgacctggttccacgccatctccggcaccaacggcactaagaggttcgacaaccccgtgctgccattcaacgacggcgtctacttcgcttcaaccgagaagtccaacatcatcagaggatggatcttcggcaccactctggacagcaagactcagtctctgctgatcgtcaacaacgccaccaacgtggtcatcaaggtgtgcgaattccagttctgcaacgacccattcctgggtgtgtaccacaagaacaacaagtcatggatggagtccgaattccgcgtctactccagcgctaacaactgcactttcgagtacgtgagccagcctttcctgatggacctggaaggaaagcagggtaacttcaagaacctgcgcgagttcgtgttcaagaacatcgacggatacttcaagatttacagcaagcacacccccatcaacctggtccgtgacctgccacagggtttctctgctctggagcccctggtggacctgccaatcggcatcaacatcaccaggttccagactctgctggctctgcaccgctcctacctgactccaggtgactcatcttctggatggactgctggagctgctgcttactacgtgggttacctgcagcctcgcaccttcctgctgaagtacaacgaaaacggcaccatcactgacgccgtcgactgcgctctggaccctctgtcagaaaccaagtgcactctgaagtccttcaccgtggagaagggtatctaccagactagcaacttccgcgtgcagcccaccgaatctatcgtccgtttcccaaacatcactaacctgtgccctttcggcgaggtcttcaacgccacccgcttcgcttccgtgtacgcctggaaccgcaagcgtatctcaaactgcgtcgctgactactccgtgctgtacaactcagcctccttcagcaccttcaagtgctacggtgtgtcacccactaagctgaacgacctgtgcttcaccaacgtctacgccgactccttcgtgatccgcggcgacgaggtccgtcagatcgctccaggccagactggaaagatcgccgactacaactacaagctgcctgacgacttcaccggctgcgtcatcgcttggaacagcaacaacctggactctaaagtgggtggcaactacaactacctgtacaggctgttcagaaagagcaacctgaagcccttcgagcgcgacatcagcactgaaatctaccaggctggctctaccccatgcaacggtgtcgagggcttcaactgctacttccctctgcagtcttacggattccagcccacttacggtgtgggctaccagccataccgtgtggtcgtgctgagcttcgaactgctgcacgcccctgctactgtgtgcggacccaagaagtctaccaacctggtcaagaacaagtgcgtgaacttcaacttcaacggtctgaccggaactggtgtcctgaccgagagcaacaagaagttcctgcccttccagcagttcggtcgcgacatcgacgacaccactgacgccgtgcgtgaccctcagaccctggaaatcctggacatcactccctgctcattcggaggtgtctccgtgatcactccaggaaccaacacttctaaccaggtcgctgtgctgtaccagggtgtcaactgcaccgaggtcccagtggccatccacgctgaccagctgacccctacttggagggtgtactccaccggcagcaacgtgttccagactagagctggttgcctgatcggcgccgagcacgtgaacaacagctacgaatgcgacatcccaatcggcgctggaatctgcgcctcttaccagacccagactaacagccacggtggttctgtcgcctctcagtcaatcatcgcttacactatgtcactgggcgctgaaaactccgtggcctactctaacaactcaatcgccatccctatcaacttcaccatctcagtgaccactgagatcctgcccgtcagcatgaccaagacttctgtggactgcactatgtacatctgcggagacagcaccgaatgctctaacctgctgctgcagtacggctccttctgcacccagctgaaccgcgctctgactggaatcgccgtggagcaggacaagaacactcaggaagtcttcgctcaggtgaagcaaatctacaagaccccacctatcaaggacttcggcggattcaacttctcccagatcctgccagacccttccaagccaagcaagaggtctttcatcgaggacctgctgttcaacaaggtcaccctggccgacgctggcttcatcaagcagtacggagactgcctgggtgacatcgccgctcgcgacctgatctgcgctcagaagttcaacggactgaccgtgctgcccccactgctgactgacgaaatgatcgcccagtacacttcagccctgctggctggaaccatcacttctggttggaccttcggtgctggtgctgctctgcagatccctttcgctatgcagatggcctaccgtttcaacggaatcggtgtcacccagaacgtgctgtacgagaaccagaagctgatcgctaaccagttcaactccgccatcggcaagatccaggacagcctgagctctactgcctctgctctgggaaagctgcaggacgtcgtgaaccagaacgcccaggctctgaacaccctggtcaagcagctgtcatccaacttcggagccatcagctctgtgctgaacgacatcctcgctaggctggaccctcccgaggctgaagtccagatcgacaggctgatcactggtagactgcagtcactgcagacctacgtgactcagcagctgatccgcgccgctgaaatccgtgcctccgctaacctggccgctaccaagatgagcgagtgcgtcctgggacagtctaagagagtggacttctgcggcaagggataccacctgatgtcattcccacagtccgctcctcacggtgtcgtgttcctgcacgtcacctacgtgcccgcccaggagaagaacttcaccactgccccagctatctgccacgacggcaaggctcacttcccccgcgaaggtgtcttcgtgtcaaacggcacccactggttcgtcactcagcgtaacttctacgagccacagatcatcaccactcacaacactttcgtgtccggaaactgcgacgtggtcatcggtatcgtcaacaacaccgtgtacgaccctctgcagcccgagctggactcattcaaggaagagctggacaagtacttcaagaaccacacctcccctgacgtcgacctgggcgacatctcaggaatcaacgcttccgtcgtgaacatccagaaggagatcgaccgcctgaacgaagtggccaagaacctgaacgaatcactgatcgacctgcaggagctgggcaagtacgaacagtacatcaagtggccttggtacatctggctgggtttcatcgctggcctcatcgctatcgtgatggtgaccatcatgctgtgctgcatgacttcatgctgctcctgcctgaagggctgctgcagctgcggatcttgctgcaagttcgacgaggacgactccgaacccgtcctgaagggagtgaagctgcactacacctaa

SEQ ID NO: 140 - protein, 1270 aa, synthetic construct
  REGION 1..1270: note = modified coronavirus S polypeptide
MFVFLVLLPLVSSQCVNLTTRTQLPPAYTNSFTRGVYYPDKVFRSSVLHSTQDLFLPFFSNVTWFHAIHVSGTNGTKRFANPVLPFNDGVYFASTEKSNIIRGWIFGTTLDSKTQSLLIVNNATNVVIKVCEFQFCNDPFLGVYYHKNNKSWMESEFRVYSSANNCTFEYVSQPFLMDLEGKQGNFKNLREFVFKNIDGYFKIYSKHTPINLVRGLPQGFSALEPLVDLPIGINITRFQTLHALHRSYLTPGDSSSGWTAGAAAYYVGYLQPRTFLLKYNENGTITDAVDCALDPLSETKCTLKSFTVEKGIYQTSNFRVQPTESIVRFPNITNLCPFGEVFNATRFASVYAWNRKRISNCVADYSVLYNSASFSTFKCYGVSPTKLNDLCFTNVYADSFVIRGDEVRQIAPGQTGNIADYNYKLPDDFTGCVIAWNSNNLDSKVGGNYNYLYRLFRKSNLKPFERDISTEIYQAGSTPCNGVKGFNCYFPLQSYGFQPTYGVGYQPYRVVVLSFELLHAPATVCGPKKSTNLVKNKCVNFNFNGLTGTGVLTESNKKFLPFQQFGRDIADTTDAVRDPQTLEILDITPCSFGGVSVITPGTNTSNQVAVLYQGVNCTEVPVAIHADQLTPTWRVYSTGSNVFQTRAGCLIGAEHVNNSYECDIPIGAGICASYQTQTNSPGGSVASQSIIAYTMSLGVENSVAYSNNSIAIPTNFTISVTTEILPVSMTKTSVDCTMYICGDSTECSNLLLQYGSFCTQLNRALTGIAVEQDKNTQEVFAQVKQIYKTPPIKDFGGNFSQILPDPSKPSKRSFIEDLLFNKVTLADAGFIKQYGDCLGDIAARDLICAQKFNGLTVLPPLLTDEMIAQYTSALLAGTITSGWTFGAGAALQIPFAMQMAYRFNGIGVTQNVLYENQKLIANQFNSAIGKIQDSLSSTASALGKLQDVVNQNAQALNTLVKQLSSNFGAISSVLNDILSRLDPPEAEVQIDRLITGRLQSLQTYVTQQLIRAAEIRASANLAATKMSECVLGQSKRVDFCGKGYHLMSFPQSAPHGVVFLHVTYVPAQEKNFTTAPAICHDGKAHFPREGVFVSNGTHWFVTQRNFYEPQIITTDNTFVSGNCDVVIGIVNNTVYDPLQPELDSFKEELDKYFKNHTSPDVDLGDISGINASVVNIQKEIDRLNEVAKNLNESLIDLQELGKYEQYIKWPWYIWLGFIAGLIAIVMVTIMLCCMTSCCSCLKGCCSCGSCCKFDEDDSEPVLKGVKLHYT

SEQ ID NO: 141 - protein, 1257 aa, synthetic construct
  REGION 1..1257: note = modified coronavirus S polypeptide
QCVNLTTRTQLPPAYTNSFTRGVYYPDKVFRSSVLHSTQDLFLPFFSNVTWFHAIHVSGTNGTKRFANPVLPFNDGVYFASTEKSNIIRGWIFGTTLDSKTQSLLIVNNATNVVIKVCEFQFCNDPFLGVYYHKNNKSWMESEFRVYSSANNCTFEYVSQPFLMDLEGKQGNFKNLREFVFKNIDGYFKIYSKHTPINLVRGLPQGFSALEPLVDLPIGINITRFQTLHALHRSYLTPGDSSSGWTAGAAAYYVGYLQPRTFLLKYNENGTITDAVDCALDPLSETKCTLKSFTVEKGIYQTSNFRVQPTESIVRFPNITNLCPFGEVFNATRFASVYAWNRKRISNCVADYSVLYNSASFSTFKCYGVSPTKLNDLCFTNVYADSFVIRGDEVRQIAPGQTGNIADYNYKLPDDFTGCVIAWNSNNLDSKVGGNYNYLYRLFRKSNLKPFERDISTEIYQAGSTPCNGVKGFNCYFPLQSYGFQPTYGVGYQPYRVVVLSFELLHAPATVCGPKKSTNLVKNKCVNFNFNGLTGTGVLTESNKKFLPFQQFGRDIADTTDAVRDPQTLEILDITPCSFGGVSVITPGTNTSNQVAVLYQGVNCTEVPVAIHADQLTPTWRVYSTGSNVFQTRAGCLIGAEHVNNSYECDIPIGAGICASYQTQTNSPGGSVASQSIIAYTMSLGVENSVAYSNNSIAIPTNFTISVTTEILPVSMTKTSVDCTMYICGDSTECSNLLLQYGSFCTQLNRALTGIAVEQDKNTQEVFAQVKQIYKTPPIKDFGGNFSQILPDPSKPSKRSFIEDLLFNKVTLADAGFIKQYGDCLGDIAARDLICAQKFNGLTVLPPLLTDEMIAQYTSALLAGTITSGWTFGAGAALQIPFAMQMAYRFNGIGVTQNVLYENQKLIANQFNSAIGKIQDSLSSTASALGKLQDVVNQNAQALNTLVKQLSSNFGAISSVLNDILSRLDPPEAEVQIDRLITGRLQSLQTYVTQQLIRAAEIRASANLAATKMSECVLGQSKRVDFCGKGYHLMSFPQSAPHGVVFLHVTYVPAQEKNFTTAPAICHDGKAHFPREGVFVSNGTHWFVTQRNFYEPQIITTDNTFVSGNCDVVIGIVNNTVYDPLQPELDSFKEELDKYFKNHTSPDVDLGDISGINASVVNIQKEIDRLNEVAKNLNESLIDLQELGKYEQYIKWPWYIWLGFIAGLIAIVMVTIMLCCMTSCCSCLKGCCSCGSCCKFDEDDSEPVLKGVKLHYT

SEQ ID NO: 142 - DNA, 3816 bp, synthetic construct
  misc_feature 1..3816: note = modified coronavirus S polypeptide
  source 1..3816: mol_type = other DNA
atgttcgtcttcctggtgctgctgcctctggtgtccagccagtgcgtgaacctgaccactaggactcagctgcctcccgcttacaccaactcattcactaggggtgtgtactacccagacaaggtcttccgctcctcagtgctgcactcaactcaggacctgttcctgcctttcttctccaacgtcacctggttccacgctatccacgtgtccggcaccaacggcactaagaggttcgccaaccccgtgctgccattcaacgacggagtctacttcgcttcaaccgagaagtccaacatcatcagaggatggatcttcggcaccactctggacagcaagactcagtctctgctgatcgtcaacaacgctaccaacgtggtcatcaaggtgtgcgaattccagttctgtaacgaccccttcctgggtgtctactaccacaagaacaacaagtcatggatggagtccgaattccgcgtctactccagcgctaacaactgcactttcgagtacgtgtcccagccattcctgatggacctggaaggaaagcagggtaacttcaagaacctgcgcgagttcgtgttcaagaacatcgacggctacttcaagatttacagcaagcacacccccatcaacctggtccgtggcctgccacagggattctctgctctggagcccctggtggacctgccaatcggcatcaacatcaccaggttccagactctgcacgccctgcacagatcctacctgactcccggagactcttcatccggttggaccgctggcgctgccgcttactacgtgggttacctgcagccacgcaccttcctgctgaagtacaacgaaaacggcaccatcactgacgccgtcgactgcgctctggacccactgtcagaaaccaagtgcactctgaagtccttcaccgtggagaagggaatctaccagacttcaaacttccgcgtgcagcctaccgaatccatcgtccgtttcccaaacatcactaacctgtgccctttcggagaggtcttcaacgccacccgcttcgcttccgtgtacgcctggaaccgcaagcgtatctcaaactgcgtcgctgactactccgtgctgtacaactcagcctccttcagcaccttcaagtgctacggagtgtcacccactaagctgaacgacctgtgcttcaccaacgtctacgctgactccttcgtgatccgcggtgacgaggtccgtcagatcgctccaggccagactggaaacatcgccgactacaactacaagctgcctgacgacttcaccggttgcgtcatcgcctggaacagcaacaacctggactctaaagtgggtggcaactacaactacctgtacaggctgttcagaaagtcaaacctgaagcccttcgagcgcgacatcagcactgaaatctaccaggctggttctaccccatgcaacggtgtcaagggcttcaactgctacttccctctgcagtcctacggcttccagcccacttacggtgtgggctaccagccataccgtgtggtcgtgctgagcttcgagctgctgcacgcccctgctactgtgtgcggacccaagaagtctaccaacctggtcaagaacaagtgcgtgaacttcaacttcaacggtctgaccggaactggtgtcctgaccgagagcaacaagaagttcctgcctttccagcagttcggtcgcgacatcgctgacaccactgacgccgtgcgtgaccctcagaccctggaaatcctggacatcactccctgctcattcggaggtgtctccgtgatcactcccggaaccaacacttctaaccaggtcgctgtgctgtaccagggtgtgaactgcaccgaagtcccagtggccatccacgctgaccagctgacccctacttggagggtgtactccaccggcagcaacgtcttccagactagagctggatgcctgatcggtgccgagcacgtcaacaacagctacgaatgcgacatccctatcggcgctggaatctgcgcctcttaccagacccagactaacagcccaggtggttctgtggcctctcagtcaatcatcgcctacaccatgtcactgggtgtcgaaaactccgtggcttactctaacaactcaatcgccatccctaccaacttcactatcagcgtgaccactgagatcctgcccgtcagcatgaccaagacttctgtggactgcactatgtacatctgcggcgacagcaccgaatgctctaacctgctgctgcagtacggttctttctgcacccagctgaaccgcgctctgactggcatcgccgtggagcaggacaagaacactcaggaagtcttcgctcaggtgaagcaaatctacaagaccccacctatcaaggacttcggcggattcaacttctcccagatcctgccagacccttccaagcccagcaagaggtctttcatcgaggacctgctgttcaacaaggtcactctggccgacgctggtttcatcaagcagtacggcgactgcctgggagacatcgctgctcgcgacctgatctgcgcccagaagttcaacggcctgaccgtgctgcccccactgctgactgacgaaatgatcgctcagtacactagcgccctgctggctggcaccatcacttcaggttggactttcggtgctggtgctgctctgcagatcccattcgctatgcagatggcctaccgtttcaacggaatcggtgtcacccagaacgtgctgtacgagaaccagaagctgatcgctaaccagttcaactcagccatcggcaagatccaggacagcctgagctctactgcctctgctctgggaaagctgcaggacgtcgtgaaccagaacgcccaggctctgaacaccctggtcaagcagctgtcatccaacttcggcgccatcagctctgtgctgaacgacatcctgtccaggctggaccctcccgaggctgaagtccagatcgacaggctgatcactggaagactgcagtcactgcagacctacgtgactcagcagctgatccgcgccgctgaaatccgtgcctccgctaacctggccgctaccaagatgagcgagtgcgtcctgggccagtctaagagagtggacttctgcggcaagggataccacctgatgtcattcccacagtccgcccctcacggagtcgtgttcctgcacgtcacctacgtgcccgctcaggagaagaacttcaccactgccccagctatctgccacgacggcaaggctcacttccctcgcgaaggagtcttcgtgagcaacggcacccactggttcgtcactcagcgtaacttctacgagccccagatcatcaccactgacaacactttcgtgtctggcaactgcgacgtggtcatcggtatcgtcaacaacaccgtgtacgaccctctgcagcccgagctggactcattcaaggaagagctggacaagtacttcaagaaccacacctcccctgacgtcgacctgggtgacatctcaggcatcaacgcctccgtcgtgaacatccagaaggagatcgaccgcctgaacgaagtggctaagaacctgaacgaaagcctgatcgacctgcaggagctgggcaagtacgaacagtacatcaagtggccatggtacatctggctgggattcatcgctggcctcatcgctatcgtgatggtgaccatcatgctgtgctgcatgacttcatgctgctcctgcctgaagggttgctgcagctgcggctcttgctgcaagttcgacgaggacgactctgaacctgtcctgaagggagtgaagctgcactacacctaa

SEQ ID NO: 143 - protein, 1269 aa, synthetic construct
  REGION 1..1269: note = modified coronavirus S polypeptide
MFVFLVLLPLVSSQCVNFTTRTQLPPAYTNSFTRGVYYPDKVFRSSVLHSTQDLFLPFFSNVTWFHAIHVSGTNGTKRFANPVLPFNDGVYFASTEKSNIIRGWIFGTTLDSKTQSLLIVNNATNVVIKVCEFQFCNDPFLGVYYHKNNKSWMESEFRVYSSANNCTFEYVSQPFLMDLEGKQGNFKNLREFVFKNIDGYFKIYSKHTPINLVRGLPQGFSALEPLVDLPIGINITRFQTLHRSYLTPGDSSSGWTAGAAAYYVGYLQPRTFLLKYNENGTITDAVDCALDPLSETKCTLKSFTVEKGIYQTSNFRVQPTESIVRFPNITNLCPFGEVFNATRFASVYAWNRKRISNCVADYSVLYNSASFSTFKCYGVSPTKLNDLCFTNVYADSFVIRGDEVRQIAPGQTGNIADYNYKLPDDFTGCVIAWNSNNLDSKVGGNYNYLYRLFRKSNLKPFERDISTEIYQAGSTPCNGVKGFNCYFPLQSYGFQPTYGVGYQPYRVVVLSFELLHAPATVCGPKKSTNLVKNKCVNFNFNGLTGTGVLTESNKKFLPFQQFGRDIADTTDAVRDPQTLEILDITPCSFGGVSVITPGTNTSNQVAVLYQGVNCTEVPVAIHADQLTPTWRVYSTGSNVFQTRAGCLIGAEHVNNSYECDIPIGAGICASYQTQTNSPQQAQSVASQSIIAYTMSLGVENSVAYSNNSIAIPTNFTISVTTEILPVSMTKTSVDCTMYICGDSTECSNLLLQYGSFCTQLNRALTGIAVEQDKNTQEVFAQVKQIYKTPPIKDFGGNFSQILPDPSKPSKRSFIEDLLFNKVTLADAGFIKQYGDCLGDIAARDLICAQKFNGLTVLPPLLTDEMIAQYTSALLAGTITSGWTFGAGAALQIPFAMQMAYRFNGIGVTQNVLYENQKLIANQFNSAIGKIQDSLSSTASALGKLQDVVNQNAQALNTLVKQLSSNFGAISSVLNDILSRLDPPEAEVQIDRLITGRLQSLQTYVTQQLIRAAEIRASANLAATKMSECVLGQSKRVDFCGKGYHLMSFPQSAPHGVVFLHVTYVPAQEKNFTTAPAICHDGKAHFPREGVFVSNGTHWFVTQRNFYEPQIITTDNTFVSGNCDVVIGIVNNTVYDPLQPELDSFKEELDKYFKNHTSPDVDLGDISGINASVVNIQKEIDRLNEVAKNLNESLIDLQELGKYEQYIKWPWYIWLGFIAGLIAIVMVTIMLCCMTSCCSCLKGCCSCGSCCKFDEDDSEPVLKGVKLHYT

SEQ ID NO: 144 - protein, 1256 aa, synthetic construct
  REGION 1..1256: note = modified coronavirus S polypeptide
QCVNFTTRTQLPPAYTNSFTRGVYYPDKVFRSSVLHSTQDLFLPFFSNVTWFHAIHVSGTNGTKRFANPVLPFNDGVYFASTEKSNIIRGWIFGTTLDSKTQSLLIVNNATNVVIKVCEFQFCNDPFLGVYYHKNNKSWMESEFRVYSSANNCTFEYVSQPFLMDLEGKQGNFKNLREFVFKNIDGYFKIYSKHTPINLVRGLPQGFSALEPLVDLPIGINITRFQTLHRSYLTPGDSSSGWTAGAAAYYVGYLQPRTFLLKYNENGTITDAVDCALDPLSETKCTLKSFTVEKGIYQTSNFRVQPTESIVRFPNITNLCPFGEVFNATRFASVYAWNRKRISNCVADYSVLYNSASFSTFKCYGVSPTKLNDLCFTNVYADSFVIRGDEVRQIAPGQTGNIADYNYKLPDDFTGCVIAWNSNNLDSKVGGNYNYLYRLFRKSNLKPFERDISTEIYQAGSTPCNGVKGFNCYFPLQSYGFQPTYGVGYQPYRVVVLSFELLHAPATVCGPKKSTNLVKNKCVNFNFNGLTGTGVLTESNKKFLPFQQFGRDIADTTDAVRDPQTLEILDITPCSFGGVSVITPGTNTSNQVAVLYQGVNCTEVPVAIHADQLTPTWRVYSTGSNVFQTRAGCLIGAEHVNNSYECDIPIGAGICASYQTQTNSPQQAQSVASQSIIAYTMSLGVENSVAYSNNSIAIPTNFTISVTTEILPVSMTKTSVDCTMYICGDSTECSNLLLQYGSFCTQLNRALTGIAVEQDKNTQEVFAQVKQIYKTPPIKDFGGNFSQILPDPSKPSKRSFIEDLLFNKVTLADAGFIKQYGDCLGDIAARDLICAQKFNGLTVLPPLLTDEMIAQYTSALLAGTITSGWTFGAGAALQIPFAMQMAYRFNGIGVTQNVLYENQKLIANQFNSAIGKIQDSLSSTASALGKLQDVVNQNAQALNTLVKQLSSNFGAISSVLNDILSRLDPPEAEVQIDRLITGRLQSLQTYVTQQLIRAAEIRASANLAATKMSECVLGQSKRVDFCGKGYHLMSFPQSAPHGVVFLHVTYVPAQEKNFTTAPAICHDGKAHFPREGVFVSNGTHWFVTQRNFYEPQIITTDNTFVSGNCDVVIGIVNNTVYDPLQPELDSFKEELDKYFKNHTSPDVDLGDISGINASVVNIQKEIDRLNEVAKNLNESLIDLQELGKYEQYIKWPWYIWLGFIAGLIAIVMVTIMLCCMTSCCSCLKGCCSCGSCCKFDEDDSEPVLKGVKLHYT

SEQ ID NO: 145 - DNA, 3812 bp, synthetic construct
  misc_feature 1..3812: note = modified coronavirus S polypeptide
  source 1..3812: mol_type = other DNA
atgttcgtcttcctggtgctgctgcctctggtgtccagccagtgcgtgaacttcaccactaggactcagctgcctcccgcttacaccaactcattcactaggggtgtgtactacccagacaaggtcttccgctcctcagtgctgcactcaactcaggacctgttcctgcctttcttctccaacgtcacctggttccacgctatccacgtgtccggcaccaacggcactaagaggttcgccaaccccgtgctgccattcaacgacggagtctacttcgcttcaaccgagaagtccaacatcatcagaggatggatcttcggcaccactctggacagcaagactcagtctctgctgatcgtcaacaacgctaccaacgtggtcatcaaggtgtgcgaattccagttctgtaacgaccccttcctgggtgtctactaccacaagaacaacaagtcatggatggagtccgaattccgcgtctactccagcgctaacaactgcactttcgagtacgtgtcccagccattcctgatggacctggaaggaaagcagggtaacttcaagaacctgcgcgagttcgtgttcaagaacatcgacggctacttcaagatttacagcaagcacacccccatcaacctggtccgtggcctgccacagggattctctgctctggagcccctggtggacctgccaatcggcatcaacatcaccaggttccagactctgcacagatcctacctgactcccggagactcttcatccggttggaccgctggcgctgccgcttactacgtgggttacctgcagccacgcaccttcctgctgaagtacaacgaaaacggcaccatcactgacgccgtcgactgcgctctggacccactgtcagaaaccaagtgcactctgaagtccttcaccgtggagaagggaatctaccagacttcaaacttccgcgtgcagcctaccgaatccatcgtccgtttcccaaacatcactaacctgtgccctttcggagaggtcttcaacgccacccgcttcgcttccgtgtacgcctggaaccgcaagcgtatctcaaactgcgtcgctgactactccgtgctgtacaactcagcctccttcagcaccttcaagtgctacggagtgtcacccactaagctgaacgacctgtgcttcaccaacgtctacgctgactccttcgtgatccgcggtgacgaggtccgtcagatcgctccaggccagactggaaacatcgccgactacaactacaagctgcctgacgacttcaccggttgcgtcatcgcctggaacagcaacaacctggactctaaagtgggtggcaactacaactacctgtacaggctgttcagaaagtcaaacctgaagcccttcgagcgcgacatcagcactgaaatctaccaggctggttctaccccatgcaacggtgtcaagggcttcaactgctacttccctctgcagtcctacggcttccagcccacttacggtgtgggctaccagccataccgtgtggtcgtgctgagcttcgagctgctgcacgcccctgctactgtgtgcggacccaagaagtctaccaacctggtcaagaacaagtgcgtgaacttcaacttcaacggtctgaccggaactggtgtcctgaccgagagcaacaagaagttcctgcctttccagcagttcggtcgcgacatcgctgacaccactgacgccgtgcgtgaccctcagaccctggaaatcctggacatcactccctgctcattcggaggtgtctccgtgatcactcccggaaccaacacttctaaccaggtcgctgtgctgtaccagggtgtgaactgcaccgaagtcccagtggccatccacgctgaccagctgacccctacttggagggtgtactccaccggcagcaacgtcttccagactagagctggatgcctgatcggtgccgagcacgtcaacaacagctacgaatgcgacatccctatcggcgctggaatctgcgcctcttaccagacccagactaacagcccccagcaggctcagtctgtggcctctcagtcaatcatcgcctacaccatgtcactgggtgtcgaaaactccgtggcttactctaacaactcaatcgccatccctaccaacttcactatcagcgtgaccactgagatcctgcccgtcagcatgaccaagacttctgtggactgcactatgtacatctgcggcgacagcaccgaatgctctaacctgctgctgcagtacggttctttctgcacccagctgaaccgcgctctgactggcatcgccgtggagcaggacaagaacactcaggaagtcttcgctcaggtgaagcaaatctacaagaccccacctatcaaggacttcggcggattcaacttctcccagatcctgccagacccttccaagcccagcaagaggtctttcatcgaggacctgctgttcaacaaggtcactctggccgacgctggtttcatcaagcagtacggcgactgcctgggagacatcgctgctcgcgacctgatctgcgcccagaagttcaacggcctgaccgtgctgcccccactgctgactgacgaaatgatcgctcagtacactagcgccctgctggctggcaccatcacttcaggttggactttcggtgctggtgctgctctgcagatcccattcgctatgcagatggcctaccgtttcaacggaatcggtgtcacccagaacgtgctgtacgagaaccagaagctgatcgctaaccagttcaactcagccatcggcaagatccaggacagcctgagctctactgcctctgctctgggaaagctgcaggacgtcgtgaaccagaacgcccaggctctgaacaccctggtcaagcagctgtcatccaacttcggcgccatcagctctgtgctgaacgacatcctgtccaggctggaccctcccgaggctgaagtccagatcgacaggctgatcactggaagactgcagtcactgcagacctacgtgactcagcagctgatccgcgccgctgaaatccgtgcctccgctaacctggccgctaccaagatgagcgagtgcgtcctgggccagtctaagagagtggacttctgcggcaagggataccacctgatgtcattcccacagtccgcccctcacggagtcgtgttcctgcacgtcacctacgtgcccgctcaggagaagaacttcaccactgccccagctatctgccacgacggcaaggctcacttccctcgcgaaggagtcttcgtgagcaacggcacccactggttcgtcactcagcgtaacttctacgagccccagatcatcaccactgacaacactttcgtgtctggcaactgcgacgtggtcatcggtatcgtcaacaacaccgtgtacgaccctctgcagcccgagctggactcattcaaggaagagctggacaagtacttcaagaaccacacctcccctgacgtcgacctgggtgacatctcaggcatcaacgcctccgtcgtgaacatccagaaggagatcgaccgcctgaacgaagtggctaagaacctgaacgaaagcctgatcgacctgcaggagctgggcaagtacgaacagtacatcaagtggccatggtacatctggctgggattcatcgctggcctcatcgctatcgtgatggtgaccatcatgctgtgctgcatgacttcatgctgctcctgcctgaagggttgctgcagctgcggctcttgctgcaagttcgacgaggacgactctgaaccttcctgaagggagtgaagctgcactacacctaa

SEQ ID NO: 146 - protein, 1267 aa, synthetic construct
  REGION 1..1267: note = modified coronavirus S polypeptide
MFVFLVLLPLVSSQCVNFTTRTQLPPAYTNSFTRGVYYPDKVFRSSVLHSTQDLFLPFFSNVTWFHAIHVSGTNGTKRFANPVLPFNDGVYFASTEKSNIIRGWIFGTTLDSKTQSLLIVNNATNVVIKVCEFQFCNDPFLGVYYHKNNKSWMESEFRVYSSANNCTFEYVSQPFLMDLEGKQGNFKNLREFVFKNIDGYFKIYSKHTPINLVRGLPQGFSALEPLVDLPIGINITRFQTLHRSYLTPGDSSSGWTAGAAAYYVGYLQPRTFLLKYNENGTITDAVDCALDPLSETKCTLKSFTVEKGIYQTSNFRVQPTESIVRFPNITNLCPFGEVFNATRFASVYAWNRKRISNCVADYSVLYNSASFSTFKCYGVSPTKLNDLCFTNVYADSFVIRGDEVRQIAPGQTGNIADYNYKLPDDFTGCVIAWNSNNLDSKVGGNYNYLYRLFRKSNLKPFERDISTEIYQAGSTPCNGVKGFNCYFPLQSYGFQPTYGVGYQPYRVVVLSFELLHAPATVCGPKKSTNLVKNKCVNFNFNGLTGTGVLTESNKKFLPFQQFGRDIADTTDAVRDPQTLEILDITPCSFGGVSVITPGTNTSNQVAVLYQGVNCTEVPVAIHADQLTPTWRVYSTGSNVFQTRAGCLIGAEHVNNSYECDIPIGAGICASYQTQTNSPGGSVASQSIIAYTMSLGVENSVAYSNNSIAIPTNFTISVTTEILPVSMTKTSVDCTMYICGDSTECSNLLLQYGSFCTQLNRALTGIAVEQDKNTQEVFAQVKQIYKTPPIKDFGGNFSQILPDPSKPSKRSFIEDLLFNKVTLADAGFIKQYGDCLGDIAARDLICAQKFNGLTVLPPLLTDEMIAQYTSALLAGTITSGWTFGAGAALQIPFAMQMAYRFNGIGVTQNVLYENQKLIANQFNSAIGKIQDSLSSTASALGKLQDVVNQNAQALNTLVKQLSSNFGAISSVLNDILSRLDPPEAEVQIDRLITGRLQSLQTYVTQQLIRAAEIRASANLAATKMSECVLGQSKRVDFCGKGYHLMSFPQSAPHGVVFLHVTYVPAQEKNFTTAPAICHDGKAHFPREGVFVSNGTHWFVTQRNFYEPQIITTDNTFVSGNCDVVIGIVNNTVYDPLQPELDSFKEELDKYFKNHTSPDVDLGDISGINASVVNIQKEIDRLNEVAKNLNESLIDLQELGKYEQYIKWPWYIWLGFIAGLIAIVMVTIMLCCMTSCCSCLKGCCSCGSCCKFDEDDSEPVLKGVKLHYT

SEQ ID NO: 147 - protein, 1254 aa, synthetic construct
  REGION 1..1254: note = modified coronavirus S polypeptide
QCVNFTTRTQLPPAYTNSFTRGVYYPDKVFRSSVLHSTQDLFLPFFSNVTWFHAIHVSGTNGTKRFANPVLPFNDGVYFASTEKSNIIRGWIFGTTLDSKTQSLLIVNNATNVVIKVCEFQFCNDPFLGVYYHKNNKSWMESEFRVYSSANNCTFEYVSQPFLMDLEGKQGNFKNLREFVFKNIDGYFKIYSKHTPINLVRGLPQGFSALEPLVDLPIGINITRFQTLHRSYLTPGDSSSGWTAGAAAYYVGYLQPRTFLLKYNENGTITDAVDCALDPLSETKCTLKSFTVEKGIYQTSNFRVQPTESIVRFPNITNLCPFGEVFNATRFASVYAWNRKRISNCVADYSVLYNSASFSTFKCYGVSPTKLNDLCFTNVYADSFVIRGDEVRQIAPGQTGNIADYNYKLPDDFTGCVIAWNSNNLDSKVGGNYNYLYRLFRKSNLKPFERDISTEIYQAGSTPCNGVKGFNCYFPLQSYGFQPTYGVGYQPYRVVVLSFELLHAPATVCGPKKSTNLVKNKCVNFNFNGLTGTGVLTESNKKFLPFQQFGRDIADTTDAVRDPQTLEILDITPCSFGGVSVITPGTNTSNQVAVLYQGVNCTEVPVAIHADQLTPTWRVYSTGSNVFQTRAGCLIGAEHVNNSYECDIPIGAGICASYQTQTNSPGGSVASQSIIAYTMSLGVENSVAYSNNSIAIPTNFTISVTTEILPVSMTKTSVDCTMYICGDSTECSNLLLQYGSFCTQLNRALTGIAVEQDKNTQEVFAQVKQIYKTPPIKDFGGNFSQILPDPSKPSKRSFIEDLLFNKVTLADAGFIKQYGDCLGDIAARDLICAQKFNGLTVLPPLLTDEMIAQYTSALLAGTITSGWTFGAGAALQIPFAMQMAYRFNGIGVTQNVLYENQKLIANQFNSAIGKIQDSLSSTASALGKLQDVVNQNAQALNTLVKQLSSNFGAISSVLNDILSRLDPPEAEVQIDRLITGRLQSLQTYVTQQLIRAAEIRASANLAATKMSECVLGQSKRVDFCGKGYHLMSFPQSAPHGVVFLHVTYVPAQEKNFTTAPAICHDGKAHFPREGVFVSNGTHWFVTQRNFYEPQIITTDNTFVSGNCDVVIGIVNNTVYDPLQPELDSFKEELDKYFKNHTSPDVDLGDISGINASVVNIQKEIDRLNEVAKNLNESLIDLQELGKYEQYIKWPWYIWLGFIAGLIAIVMVTIMLCCMTSCCSCLKGCCSCGSCCKFDEDDSEPVLKGVKLHYT

SEQ ID NO: 148 - DNA, 3804 bp, synthetic construct
  misc_feature 1..3804: note = modified coronavirus S polypeptide
  source 1..3804: mol_type = other DNA
atgttcgtcttcctggtgctgctgcctctggtgtccagccagtgcgtgaacttcaccactaggactcagctgcctcccgcttacaccaactcattcactaggggtgtgtactacccagacaaggtcttccgctcctcagtgctgcactcaactcaggacctgttcctgcctttcttctccaacgtcacctggttccacgctatccacgtgtccggcaccaacggcactaagaggttcgccaaccccgtgctgccattcaacgacggagtctacttcgcttcaaccgagaagtccaacatcatcagaggatggatcttcggcaccactctggacagcaagactcagtctctgctgatcgtcaacaacgctaccaacgtggtcatcaaggtgtgcgaattccagttctgtaacgaccccttcctgggtgtctactaccacaagaacaacaagtcatggatggagtccgaattccgcgtctactccagcgctaacaactgcactttcgagtacgtgtcccagccattcctgatggacctggaaggaaagcagggtaacttcaagaacctgcgcgagttcgtgttcaagaacatcgacggctacttcaagatttacagcaagcacacccccatcaacctggtccgtggcctgccacagggattctctgctctggagcccctggtggacctgccaatcggcatcaacatcaccaggttccagactctgcacagatcctacctgactcccggagactcttcatccggttggaccgctggcgctgccgcttactacgtgggttacctgcagccacgcaccttcctgctgaagtacaacgaaaacggcaccatcactgacgccgtcgactgcgctctggacccactgtcagaaaccaagtgcactctgaagtccttcaccgtggagaagggaatctaccagacttcaaacttccgcgtgcagcctaccgaatccatcgtccgtttcccaaacatcactaacctgtgccctttcggagaggtcttcaacgccacccgcttcgcttccgtgtacgcctggaaccgcaagcgtatctcaaactgcgtcgctgactactccgtgctgtacaactcagcctccttcagcaccttcaagtgctacggagtgtcacccactaagctgaacgacctgtgcttcaccaacgtctacgctgactccttcgtgatccgcggtgacgaggtccgtcagatcgctccaggccagactggaaacatcgccgactacaactacaagctgcctgacgacttcaccggttgcgtcatcgcctggaacagcaacaacctggactctaaagtgggtggcaactacaactacctgtacaggctgttcagaaagtcaaacctgaagcccttcgagcgcgacatcagcactgaaatctaccaggctggttctaccccatgcaacggtgtcaagggcttcaactgctacttccctctgcagtcctacggcttccagcccacttacggtgtgggctaccagccataccgtgtggtcgtgctgagcttcgagctgctgcacgcccctgctactgtgtgcggacccaagaagtctaccaacctggtcaagaacaagtgcgtgaacttcaacttcaacggtctgaccggaactggtgtcctgaccgagagcaacaagaagttcctgcctttccagcagttcggtcgcgacatcgctgacaccactgacgccgtgcgtgaccctcagaccctggaaatcctggacatcactccctgctcattcggaggtgtctccgtgatcactcccggaaccaacacttctaaccaggtcgctgtgctgtaccagggtgtgaactgcaccgaagtcccagtggccatccacgctgaccagctgacccctacttggagggtgtactccaccggcagcaacgtcttccagactagagctggatgcctgatcggtgccgagcacgtcaacaacagctacgaatgcgacatccctatcggcgctggaatctgcgcctcttaccagacccagactaacagcccaggtggttctgtggcctctcagtcaatcatcgcctacaccatgtcactgggtgtcgaaaactccgtggcttactctaacaactcaatcgccatccctaccaacttcactatcagcgtgaccactgagatcctgcccgtcagcatgaccaagacttctgtggactgcactatgtacatctgcggcgacagcaccgaatgctctaacctgctgctgcagtacggttctttctgcacccagctgaaccgcgctctgactggcatcgccgtggagcaggacaagaacactcaggaagtcttcgctcaggtgaagcaaatctacaagaccccacctatcaaggacttcggcggattcaacttctcccagatcctgccagacccttccaagcccagcaagaggtctttcatcgaggacctgctgttcaacaaggtcactctggccgacgctggtttcatcaagcagtacggcgactgcctgggagacatcgctgctcgcgacctgatctgcgcccagaagttcaacggcctgaccgtgctgcccccactgctgactgacgaaatgatcgctcagtacactagcgccctgctggctggcaccatcacttcaggttggactttcggtgctggtgctgctctgcagatcccattcgctatgcagatggcctaccgtttcaacggaatcggtgtcacccagaacgtgctgtacgagaaccagaagctgatcgctaaccagttcaactcagccatcggcaagatccaggacagcctgagctctactgcctctgctctgggaaagctgcaggacgtcgtgaaccagaacgcccaggctctgaacaccctggtcaagcagctgtcatccaacttcggcgccatcagctctgtgctgaacgacatcctgtccaggctggaccctcccgaggctgaagtccagatcgacaggctgatcactggaagactgcagtcactgcagacctacgtgactcagcagctgatccgcgccgctgaaatccgtgcctccgctaacctggccgctaccaagatgagcgagtgcgtcctgggccagtctaagagagtggacttctgcggcaagggataccacctgatgtcattcccacagtccgcccctcacggagtcgtgttcctgcacgtcacctacgtgcccgctcaggagaagaacttcaccactgccccagctatctgccacgacggcaaggctcacttccctcgcgaaggagtcttcgtgagcaacggcacccactggttcgtcactcagcgtaacttctacgagccccagatcatcaccactgacaacactttcgtgtctggcaactgcgacgtggtcatcggtatcgtcaacaacaccgtgtacgaccctctgcagcccgagctggactcattcaaggaagagctggacaagtacttcaagaaccacacctcccctgacgtcgacctgggtgacatctcaggcatcaacgcctccgtcgtgaacatccagaaggagatcgaccgcctgaacgaagtggctaagaacctgaacgaaagcctgatcgacctgcaggagctgggcaagtacgaacagtacatcaagtggccatggtacatctggctgggattcatcgctggcctcatcgctatcgtgatggtgaccatcatgctgtgctgcatgacttcatgctgctcctgcctgaagggttgctgcagctgcggctcttgctgcaagttcgacgaggacgactctgaacctgtcctgaagggagtgaagctgcactacacc

SEQ ID NO: 149 - protein, 1273 aa, synthetic construct
  REGION 1..1273: note = modified coronavirus S polypeptide
MFVFLVLLPLVSSQCVNFTNRTQLPSAYTNSFTRGVYYPDKVFRSSVLHSTQDLFLPFFSNVTWFHAIHVSGTNGTKRFDNPVLPFNDGVYFASTEKSNIIRGWIFGTTLDSKTQSLLIVNNATNVVIKVCEFQFCNYPFLGVYYHKNNKSWMESEFRVYSSANNCTFEYVSQPFLMDLEGKQGNFKNLSEFVFKNIDGYFKIYSKHTPINLVRDLPQGFSALEPLVDLPIGINITRFQTLLALHRSYLTPGDSSSGWTAGAAAYYVGYLQPRTFLLKYNENGTITDAVDCALDPLSETKCTLKSFTVEKGIYQTSNFRVQPTESIVRFPNITNLCPFGEVFNATRFASVYAWNRKRISNCVADYSVLYNSASFSTFKCYGVSPTKLNDLCFTNVYADSFVIRGDEVRQIAPGQTGTIADYNYKLPDDFTGCVIAWNSNNLDSKVGGNYNYLYRLFRKSNLKPFERDISTEIYQAGSTPCNGVKGFNCYFPLQSYGFQPTYGVGYQPYRVVVLSFELLHAPATVCGPKKSTNLVKNKCVNFNFNGLTGTGVLTESNKKFLPFQQFGRDIADTTDAVRDPQTLEILDITPCSFGGVSVITPGTNTSNQVAVLYQGVNCTEVPVAIHADQLTPTWRVYSTGSNVFQTRAGCLIGAEYVNNSYECDIPIGAGICASYQTQTNSPQQAQSVASQSIIAYTMSLGAENSVAYSNNSIAIPTNFTISVTTEILPVSMTKTSVDCTMYICGDSTECSNLLLQYGSFCTQLNRALTGIAVEQDKNTQEVFAQVKQIYKTPPIKDFGGFNFSQILPDPSKPSKRSFIEDLLFNKVTLADAGFIKQYGDCLGDIAARDLICAQKFNGLTVLPPLLTDEMIAQYTSALLAGTITSGWTFGAGAALQIPFAMQMAYRFNGIGVTQNVLYENQKLIANQFNSAIGKIQDSLSSTASALGKLQDVVNQNAQALNTLVKQLSSNFGAISSVLNDILSRLDPPEAEVQIDRLITGRLQSLQTYVTQQLIRAAEIRASANLAAIKMSECVLGQSKRVDFCGKGYHLMSFPQSAPHGVVFLHVTYVPAQEKNFTTAPAICHDGKAHFPREGVFVSNGTHWFVTQRNFYEPQIITTDNTFVSGNCDVVIGIVNNTVYDPLQPELDSFKEELDKYFKNHTSPDVDLGDISGINASFVNIQKEIDRLNEVAKNLNESLIDLQELGKYEQYIKWPWYIWLGFIAGLIAIVMVTIMLCCMTSCCSCLKGCCSCGSCCKFDEDDSEPVLKGVKLHYT

SEQ ID NO: 150 - DNA, 3822 bp, synthetic construct
  misc_feature 1..3822: note = modified coronavirus S polypeptide
  source 1..3822: mol_type = other DNA
atgttcgtcttcctggtgctgctgcctctggtgtccagccagtgcgtgaacttcaccaaccgcactcagctgcctagcgcttacaccaactctttcactaggggtgtgtactaccccgacaaggtcttccgctcctcagtgctgcactctactcaggacctgttcctgcccttcttctctaacgtcacctggttccacgccatccacgtgagcggcaccaacggcactaagaggttcgacaacccagtgctgcctttcaacgacggtgtctacttcgcttcaaccgagaagtccaacatcatcagaggatggatcttcggcaccactctggacagcaagactcagtctctgctgatcgtcaacaacgccaccaacgtggtcatcaaggtgtgcgaattccagttctgcaactacccattcctgggcgtctactaccacaagaacaacaagtcatggatggagtccgaattccgcgtctactccagcgctaacaactgcactttcgagtacgtgtcccagcctttcctgatggacctggaaggaaagcagggtaacttcaagaacctgtcagagttcgtgttcaagaacatcgacggatacttcaagatttactccaagcacaccccaatcaacctggtccgtgacctgcctcagggtttctcagctctggagccactggtggacctgcctatcggcatcaacatcaccaggttccagactctgctggctctgcacagatcctacctgactccaggtgactcatcttctggatggactgctggagctgctgcttactacgtgggttacctgcagcctcgcaccttcctgctgaagtacaacgaaaacggcaccatcactgacgccgtcgactgcgctctggaccctctgagcgaaaccaagtgcactctgaagtctttcaccgtggagaagggtatctaccagactagcaacttccgcgtgcagcccaccgaatctatcgtccgtttccctaacatcactaacctgtgccccttcggcgaggtcttcaacgccacccgtttcgcttccgtgtacgcctggaaccgcaagcgtatcagcaactgcgtcgctgactactctgtgctgtacaactcagcctccttcagcactttcaagtgctacggtgtgagccctactaagctgaacgacctgtgcttcaccaacgtctacgccgactctttcgtgatccgcggcgacgaggtccgtcagatcgctccaggccagaccggaactatcgccgactacaactacaagctgcctgacgacttcaccggctgcgtcatcgcttggaactcaaacaacctggactccaaagtgggtggcaactacaactacctgtacaggctgttcagaaagtcaaacctgaagcccttcgagagggacatctcaactgaaatctaccaggccggctccaccccatgcaacggtgtcaagggcttcaactgctacttccccctgcagtcctacggattccagccaacttacggtgtgggctaccagccttacagagtggtcgtgctgtcattcgaactcctccacgctcctgctactgtgtgcggaccaaagaagtccaccaacctggtcaagaacaagtgcgtgaacttcaacttcaacggtctgaccggaactggtgtcctgaccgagtcaaacaagaagttcctgcccttccagcagttcggtcgcgacatcgctgacactaccgacgccgtgcgtgacccccagaccctggaaatcctggacatcactccatgcagcttcggaggtgtctctgtgatcactccaggaaccaacacttccaaccaggtcgctgtgctgtaccagggtgtcaactgcaccgaagtccctgtggccatccacgctgaccagctgacccccacttggagggtgtactccaccggcagcaacgtcttccagactagagctggttgcctgatcggcgccgagtacgtgaacaactcatacgaatgcgacatccctatcggcgctggaatctgcgcctcctaccagacccagactaactcaccccagcaggctcagtccgtcgcctctcagtcaatcatcgcttacaccatgagcctgggcgctgaaaactctgtggcctactctaacaactcaatcgccatccccaccaacttcactatcagcgtgaccactgagatcctgccagtctcaatgaccaagacttccgtggactgcactatgtacatctgcggagacagcaccgaatgctctaacctgctgctgcagtacggctctttctgcacccagctgaacagggctctgactggaatcgccgtggagcaggacaagaacactcaggaagtcttcgctcaggtgaagcaaatctacaagacccctcccatcaaggacttcggcggattcaacttctcccagatcctgcctgacccctccaagcccagcaagcgctctttcatcgaggacctgctgttcaacaaggtcaccctggccgacgctggcttcatcaagcagtacggagactgcctgggtgacatcgccgctcgtgacctgatctgcgctcagaagttcaacggactgaccgtgctgccacctctgctgactgacgaaatgatcgcccagtacacttcagccctgctggctggaaccatcacttctggttggaccttcggtgctggtgctgctctgcagatcccattcgctatgcagatggcctaccgcttcaacggaatcggtgtcacccagaacgtgctgtacgagaaccagaagctgatcgctaaccagttcaacagcgccatcggcaagatccaggactcactgagctctactgcctccgctctgggaaagctgcaggacgtcgtgaaccagaacgcccaggctctgaacaccctggtcaagcagctgtcatccaacttcggagctatcagctctgtgctgaacgacatcctctcccgcctggaccctcctgaggctgaagtccagatcgacaggctgatcactggtagactgcagagcctgcagacctacgtgactcagcagctgatccgcgccgctgaaatccgtgcctctgctaacctggctgctatcaagatgtcagagtgcgtcctgggacagtccaagagagtggacttctgcggcaagggataccacctgatgtcattccctcagtccgctccccacggtgtcgtgttcctgcacgtcacctacgtgccagcccaggagaagaacttcaccactgcccctgctatctgccacgacggcaaggctcacttcccccgcgaaggtgtcttcgtgagcaacggcacccactggttcgtcactcagcgtaacttctacgagccacagatcatcaccactgacaacactttcgtgtctggaaactgcgacgtggtcatcggtatcgtcaacaacaccgtgtacgaccccctgcagccagagctggacagcttcaaggaagagctggacaagtacttcaagaaccacacctctcccgacgtggacctgggcgacatcagcggaatcaacgcttctttcgtcaacatccagaaggagatcgaccgtctgaacgaagtggccaagaacctgaacgaatcactgatcgacctgcaggagctgggcaagtacgaacagtacatcaagtggccatggtacatctggctgggtttcatcgctggcctcatcgctatcgtgatggtgaccatcatgctgtgctgcatgacttcatgctgctcctgcctgaagggctgctgcagctgcggatcttgctgcaagttcgacgaggacgactccgaacctgtcctgaagggagtgaagctgcactacacctaa

SEQ ID NO: 151 - protein, 1260 aa, synthetic construct
  REGION 1..1260: note = modified coronavirus S polypeptide
QCVNFTNRTQLPSAYTNSFTRGVYYPDKVFRSSVLHSTQDLFLPFFSNVTWFHAIHVSGTNGTKRFDNPVLPFNDGVYFASTEKSNIIRGWIFGTTLDSKTQSLLIVNNATNVVIKVCEFQFCNYPFLGVYYHKNNKSWMESEFRVYSSANNCTFEYVSQPFLMDLEGKQGNFKNLSEFVFKNIDGYFKIYSKHTPINLVRDLPQGFSALEPLVDLPIGINITRFQTLLALHRSYLTPGDSSSGWTAGAAAYYVGYLQPRTFLLKYNENGTITDAVDCALDPLSETKCTLKSFTVEKGIYQTSNFRVQPTESIVRFPNITNLCPFGEVFNATRFASVYAWNRKRISNCVADYSVLYNSASFSTFKCYGVSPTKLNDLCFTNVYADSFVIRGDEVRQIAPGQTGTIADYNYKLPDDFTGCVIAWNSNNLDSKVGGNYNYLYRLFRKSNLKPFERDISTEIYQAGSTPCNGVKGFNCYFPLQSYGFQPTYGVGYQPYRVVVLSFELLHAPATVCGPKKSTNLVKNKCVNFNFNGLTGTGVLTESNKKFLPFQQFGRDIADTTDAVRDPQTLEILDITPCSFGGVSVITPGTNTSNQVAVLYQGVNCTEVPVAIHADQLTPTWRVYSTGSNVFQTRAGCLIGAEYVNNSYECDIPIGAGICASYQTQTNSPQQAQSVASQSIIAYTMSLGAENSVAYSNNSIAIPTNFTISVTTEILPVSMTKTSVDCTMYICGDSTECSNLLLQYGSFCTQLNRALTGIAVEQDKNTQEVFAQVKQIYKTPPIKDFGGFNFSQILPDPSKPSKRSFIEDLLFNKVTLADAGFIKQYGDCLGDIAARDLICAQKFNGLTVLPPLLTDEMIAQYTSALLAGTITSGWTFGAGAALQIPFAMQMAYRFNGIGVTQNVLYENQKLIANQFNSAIGKIQDSLSSTASALGKLQDVVNQNAQALNTLVKQLSSNFGAISSVLNDILSRLDPPEAEVQIDRLITGRLQSLQTYVTQQLIRAAEIRASANLAAIKMSECVLGQSKRVDFCGKGYHLMSFPQSAPHGVVFLHVTYVPAQEKNFTTAPAICHDGKAHFPREGVFVSNGTHWFVTQRNFYEPQIITTDNTFVSGNCDVVIGIVNNTVYDPLQPELDSFKEELDKYFKNHTSPDVDLGDISGINASFVNIQKEIDRLNEVAKNLNESLIDLQELGKYEQYIKWPWYIWLGFIAGLIAIVMVTIMLCCMTSCCSCLKGCCSCGSCCKFDEDDSEPVLKGVKLHYT

SEQ ID NO: 152 - protein, 1273 aa, synthetic construct
  REGION 1..1273: note = modified coronavirus S polypeptide
MFVFLVLLPLVSIQCVNLTTRTQLPPAYTNSFTRGVYYPDKVFRSSVLHSTQDLFLPFFSNVTWFHAIHVSGTNGTKRFDNPVLPFNDGVYFASTEKSNIIRGWIFGTTLDSKTQSLLIVNNATNVVIKVCEFQFCNDPFLGVYYHKNNKSCMESEFRVYSSANNCTFEYVSQPFLMDLEGKQGNFKNLREFVFKNIDGYFKIYSKHTPINLVRDLPQGFSALEPLVDLPIGINITRFQTLLALHRSYLTPGDSSSGWTAGAAAYYVGYLQPRTFLLKYNENGTITDAVDCALDPLSETKCTLKSFTVEKGIYQTSNFRVQPTESIVRFPNITNLCPFGEVFNATRFASVYAWNRKRISNCVADYSVLYNSASFSTFKCYGVSPTKLNDLCFTNVYADSFVIRGDEVRQIAPGQTGKIADYNYKLPDDFTGCVIAWNSNNLDSKVGGNYNYRYRLFRKSNLKPFERDISTEIYQAGSTPCNGVEGFNCYFPLQPYGFQPTNGVGYQPYRVVVLSFELLHAPATVCGPKKSTNLVKNKCVNFNFNGLTGTGVLTESNKKFLPFQQFGRDIADTTDAVRDPQTLEILDITPCSFGGVSVITPGTNTSNQVAVLYQGVNCTEVPVAIHADQLTPTWRVYSTGSNVFQTRAGCLIGAEHVNNSYECDIPIGAGICASYQTQTNSPQQAQSVASQSIIAYTMSLGAENSVAYSNNSIAIPTNFTISVTTEILPVSMTKTSVDCTMYICGDSTECSNLLLQYGSFCTQLNRALTGIAVEQDKNTQEVFAQVKQIYKTPPIKDFGGFNFSQILPDPSKPSKRSFIEDLLFNKVTLADAGFIKQYGDCLGDIAARDLICAQKFNGLTVLPPLLTDEMIAQYTSALLAGTITSGWTFGAGAALQIPFAMQMAYRFNGIGVTQNVLYENQKLIANQFNSAIGKIQDSLSSTASALGKLQDVVNQNAQALNTLVKQLSSNFGAISSVLNDILSRLDPPEAEVQIDRLITGRLQSLQTYVTQQLIRAAEIRASANLAATKMSECVLGQSKRVDFCGKGYHLMSFPQSAPHGVVFLHVTYVPAQEKNFTTAPAICHDGKAHFPREGVFVSNGTHWFVTQRNFYEPQIITTDNTFVSGNCDVVIGIVNNTVYDPLQPELDSFKEELDKYFKNHTSPDVDLGDISGINASVVNIQKEIDRLNEVAKNLNESLIDLQELGKYEQYIKWPWYIWLGFIAGLIAIVMVTIMLCCMTSCCSCLKGCCSCGSCCKFDEDDSEPVLKGVKLHYT

SEQ ID NO: 153 - protein, 1260 aa, synthetic construct
  REGION 1..1260: note = modified coronavirus S polypeptide
QCVNLTTRTQLPPAYTNSFTRGVYYPDKVFRSSVLHSTQDLFLPFFSNVTWFHAIHVSGTNGTKRFDNPVLPFNDGVYFASTEKSNIIRGWIFGTTLDSKTQSLLIVNNATNVVIKVCEFQFCNDPFLGVYYHKNNKSCMESEFRVYSSANNCTFEYVSQPFLMDLEGKQGNFKNLREFVFKNIDGYFKIYSKHTPINLVRDLPQGFSALEPLVDLPIGINITRFQTLLALHRSYLTPGDSSSGWTAGAAAYYVGYLQPRTFLLKYNENGTITDAVDCALDPLSETKCTLKSFTVEKGIYQTSNFRVQPTESIVRFPNITNLCPFGEVFNATRFASVYAWNRKRISNCVADYSVLYNSASFSTFKCYGVSPTKLNDLCFTNVYADSFVIRGDEVRQIAPGQTGKIADYNYKLPDDFTGCVIAWNSNNLDSKVGGNYNYRYRLFRKSNLKPFERDISTEIYQAGSTPCNGVEGFNCYFPLQPYGFQPTNGVGYQPYRVVVLSFELLHAPATVCGPKKSTNLVKNKCVNFNFNGLTGTGVLTESNKKFLPFQQFGRDIADTTDAVRDPQTLEILDITPCSFGGVSVITPGTNTSNQVAVLYQGVNCTEVPVAIHADQLTPTWRVYSTGSNVFQTRAGCLIGAEHVNNSYECDIPIGAGICASYQTQTNSPQQAQSVASQSIIAYTMSLGAENSVAYSNNSIAIPTNFTISVTTEILPVSMTKTSVDCTMYICGDSTECSNLLLQYGSFCTQLNRALTGIAVEQDKNTQEVFAQVKQIYKTPPIKDFGGFNFSQILPDPSKPSKRSFIEDLLFNKVTLADAGFIKQYGDCLGDIAARDLICAQKFNGLTVLPPLLTDEMIAQYTSALLAGTITSGWTFGAGAALQIPFAMQMAYRFNGIGVTQNVLYENQKLIANQFNSAIGKIQDSLSSTASALGKLQDVVNQNAQALNTLVKQLSSNFGAISSVLNDILSRLDPPEAEVQIDRLITGRLQSLQTYVTQQLIRAAEIRASANLAATKMSECVLGQSKRVDFCGKGYHLMSFPQSAPHGVVFLHVTYVPAQEKNFTTAPAICHDGKAHFPREGVFVSNGTHWFVTQRNFYEPQIITTDNTFVSGNCDVVIGIVNNTVYDPLQPELDSFKEELDKYFKNHTSPDVDLGDISGINASVVNIQKEIDRLNEVAKNLNESLIDLQELGKYEQYIKWPWYIWLGFIAGLIAIVMVTIMLCCMTSCCSCLKGCCSCGSCCKFDEDDSEPVLKGVKLHYT

SEQ ID NO: 154 - protein, 13 aa, synthetic construct
  REGION 1..13: note = N-terminal signal peptide
MFVFFVLLPLVSS

SEQ ID NO: 155 - protein, 1273 aa, synthetic construct
  REGION 1..1273: note = modified coronavirus S polypeptide
MFVFFVLLPLVSSQCVNLTTRTQLPPAYTNSFTRGVYYPDKVFRSSVLHSTQDLFLPFFSNVTWFHAIHVSGTNGTKRFDNPVLPFNDGVYFASIEKSNIIRGWIFGTTLDSKTQSLLIVNNATNVVIKVCEFQFCNDPFLGVYYHKNNKSWMESEFRVYSSANNCTFEYVSQPFLMDLEGKQGNFKNLREFVFKNIDGYFKIYSKHTPINLVRDLPQGFSALEPLVDLPIGINITRFQTLLALHRSYLTPGGSSSGWTAGAAAYYVGYLQPRTFLLKYNENGTITDAVDCALDPLSETKCTLKSFTVEKGIYQTSNFRVQPTESIVRFPNITNLCPFGEVFNATRFASVYAWNRKRISNCVADYSVLYNSASFSTFKCYGVSPTKLNDLCFTNVYADSFVIRGDEVRQIAPGQTGKIADYNYKLPDDFTGCVIAWNSNNLDSKVGGNYNYLYRLFRKSNLKPFERDISTEIYQAGSTPCNGVKGFNCYFPLQSYGFQPTNGVGYQPYRVVVLSFELLHAPATVCGPKKSTNLVKNKCVNFNFNGLTGTGVLTESNKKFLPFQQFGRDIADTTDAVRDPQTLEILDITPCSFGGVSVITPGTNTSNQVAVLYQGVNCTEVPVAIHADQLTPTWRVYSTGSNVFQTRAGCLIGAEHVNNSYECDIPIGAGICASYQTQTNSPQQAQSVASQSIIAYTMSLGVENSVAYSNNSIAIPTNFTISVTTEILPVSMTKTSVDCTMYICGDSTECSNLLLQYGSFCTQLNRALTGIAVEQDKNTQEVFAQVKQIYKTPPIKDFGGFNFSQILPDPSKPSKRSFIEDLLFNKVTLADAGFIKQYGDCLGDIAARDLICAQKFNGLTVLPPLLTDEMIAQYTSALLAGTITSGWTFGAGAALQIPFAMQMAYRFNGIGVTQNVLYENQKLIANQFNSAIGKIQDSLSSTASALGKLQDVVNQNAQALNTLVKQLSSNFGAISSVLNDILSRLDPPEAEVQIDRLITGRLQSLQTYVTQQLIRAAEIRASANLAATKMSECVLGQSKRVDFCGKGYHLMSFPQSAPHGVVFLHVTYVPAQEKNFTTAPAICHDGKAHFPREGVFVSNGTHWFVTQRNFYEPQIITTDNTFVSGNCDVVIGIVNNTVYDPLQPELDSFKEELDKYFKNHTSPDVDLGDISGINASVVNIQKEIDRLNEVAKNLNESLIDLQELGKYEQYIKWPWYIWLGFIAGLIAIVMVTIMLCCMTSCCSCLKGCCSCGSCCKFDEDDSEPVLKGVKLHYT

SEQ ID NO: 156 - protein, 1260 aa, synthetic construct
  REGION 1..1260: note = modified coronavirus S polypeptide
QCVNLTTRTQLPPAYTNSFTRGVYYPDKVFRSSVLHSTQDLFLPFFSNVTWFHAIHVSGTNGTKRFDNPVLPFNDGVYFASIEKSNIIRGWIFGTTLDSKTQSLLIVNNATNVVIKVCEFQFCNDPFLGVYYHKNNKSWMESEFRVYSSANNCTFEYVSQPFLMDLEGKQGNFKNLREFVFKNIDGYFKIYSKHTPINLVRDLPQGFSALEPLVDLPIGINITRFQTLLALHRSYLTPGGSSSGWTAGAAAYYVGYLQPRTFLLKYNENGTITDAVDCALDPLSETKCTLKSFTVEKGIYQTSNFRVQPTESIVRFPNITNLCPFGEVFNATRFASVYAWNRKRISNCVADYSVLYNSASFSTFKCYGVSPTKLNDLCFTNVYADSFVIRGDEVRQIAPGQTGKIADYNYKLPDDFTGCVIAWNSNNLDSKVGGNYNYLYRLFRKSNLKPFERDISTEIYQAGSTPCNGVKGFNCYFPLQSYGFQPTNGVGYQPYRVVVLSFELLHAPATVCGPKKSTNLVKNKCVNFNFNGLTGTGVLTESNKKFLPFQQFGRDIADTTDAVRDPQTLEILDITPCSFGGVSVITPGTNTSNQVAVLYQGVNCTEVPVAIHADQLTPTWRVYSTGSNVFQTRAGCLIGAEHVNNSYECDIPIGAGICASYQTQTNSPQQAQSVASQSIIAYTMSLGVENSVAYSNNSIAIPTNFTISVTTEILPVSMTKTSVDCTMYICGDSTECSNLLLQYGSFCTQLNRALTGIAVEQDKNTQEVFAQVKQIYKTPPIKDFGGFNFSQILPDPSKPSKRSFIEDLLFNKVTLADAGFIKQYGDCLGDIAARDLICAQKFNGLTVLPPLLTDEMIAQYTSALLAGTITSGWTFGAGAALQIPFAMQMAYRFNGIGVTQNVLYENQKLIANQFNSAIGKIQDSLSSTASALGKLQDVVNQNAQALNTLVKQLSSNFGAISSVLNDILSRLDPPEAEVQIDRLITGRLQSLQTYVTQQLIRAAEIRASANLAATKMSECVLGQSKRVDFCGKGYHLMSFPQSAPHGVVFLHVTYVPAQEKNFTTAPAICHDGKAHFPREGVFVSNGTHWFVTQRNFYEPQIITTDNTFVSGNCDVVIGIVNNTVYDPLQPELDSFKEELDKYFKNHTSPDVDLGDISGINASVVNIQKEIDRLNEVAKNLNESLIDLQELGKYEQYIKWPWYIWLGFIAGLIAIVMVTIMLCCMTSCCSCLKGCCSCGSCCKFDEDDSEPVLKGVKLHYT

SEQ ID NO: 157 - protein, 1273 aa, synthetic construct
  REGION 1..1273: note = modified coronavirus S polypeptide
MFVFFVLLPLVSSQCVNLTTRTQLPPAYTNSFTRGVYYPDKVFRSSVLHSTQDLFLPFFSNVTWFHAIHVSGTNGTKRFDNPVLPFNDGVYFASIEKSNIIRGWIFGTTLDSKTQSLLIVNNATNVVIKVCEFQFCNDPFLGVYYHKNNKSWMESEFRVYSSANNCTFEYVSQPFLMDLEGKQGNFKNLREFVFKNIDGYFKIYSKHTPINLVRDLPQGFSALEPLVDLPIGINITRFQTLLALHRSYLTPGGSSSGWTAGAAAYYVGYLQPRTFLLKYNENGTITDAVDCALDPLSETKCTLKSFTVEKGIYQTSNFRVQPTESIVRFPNITNLCPFGEVFNATRFASVYAWNRKRISNCVADYSVLYNSASFSTFKCYGVSPTKLNDLCFTNVYADSFVIRGDEVRQIAPGQTGKIADYNYKLPDDFTGCVIAWNSNNLDSKVGGNYNYLYRLFRKSNLKPFERDISTEIYQAGNTPCNGVEGFNCYFPLQSYGFQPTNGVGYQPYRVVVLSFELLHAPATVCGPKKSTNLVKNKCVNFNFNGLTGTGVLTESNKKFLPFQQFGRDIADTTDAVRDPQTLEILDITPCSFGGVSVITPGTNTSNQVAVLYQGVNCTEVPVAIHADQLTPTWRVYSTGSNVFQTRAGCLIGAEHVNNSYECDIPIGAGICASYQTQTNSPQQAQSVASQSIIAYTMSLGVENSVAYSNNSIAIPTNFTISVTTEILPVSMTKTSVDCTMYICGDSTECSNLLLQYGSFCTQLNRALTGIAVEQDKNTQEVFAQVKQIYKTPPIKDFGGFNFSQILPDPSKPSKRSFIEDLLFNKVTLADAGFIKQYGDCLGDIAARDLICAQKFNGLTVLPPLLTDEMIAQYTSALLAGTITSGWTFGAGAALQIPFAMQMAYRFNGIGVTQNVLYENQKLIANQFNSAIGKIQDSLSSTASALGKLQDVVNQNAQALNTLVKQLSSNFGAISSVLNDILSRLDPPEAEVQIDRLITGRLQSLQTYVTQQLIRAAEIRASANLAATKMSECVLGQSKRVDFCGKGYHLMSFPQSAPHGVVFLHVTYVPAQEKNFTTAPAICHDGKAHFPREGVFVSNGTHWFVTQRNFYEPQIITTDNTFVSGNCDVVIGIVNNTVYDPLQPELDSFKEELDKYFKNHTSPDVDLGDISGINASVVNIQKEIDRLNEVAKNLNESLIDLQELGKYEQYIKWPWYIWLGFIAGLIAIVMVTIMLCCMTSCCSCLKGCCSCGSCCKFDEDDSEPVLKGVKLHYT

SEQ ID NO: 158 - protein, 1260 aa, synthetic construct
  REGION 1..1260: note = modified coronavirus S polypeptide
QCVNLTTRTQLPPAYTNSFTRGVYYPDKVFRSSVLHSTQDLFLPFFSNVTWFHAIHVSGTNGTKRFDNPVLPFNDGVYFASIEKSNIIRGWIFGTTLDSKTQSLLIVNNATNVVIKVCEFQFCNDPFLGVYYHKNNKSWMESEFRVYSSANNCTFEYVSQPFLMDLEGKQGNFKNLREFVFKNIDGYFKIYSKHTPINLVRDLPQGFSALEPLVDLPIGINITRFQTLLALHRSYLTPGGSSSGWTAGAAAYYVGYLQPRTFLLKYNENGTITDAVDCALDPLSETKCTLKSFTVEKGIYQTSNFRVQPTESIVRFPNITNLCPFGEVFNATRFASVYAWNRKRISNCVADYSVLYNSASFSTFKCYGVSPTKLNDLCFTNVYADSFVIRGDEVRQIAPGQTGKIADYNYKLPDDFTGCVIAWNSNNLDSKVGGNYNYLYRLFRKSNLKPFERDISTEIYQAGNTPCNGVEGFNCYFPLQSYGFQPTNGVGYQPYRVVVLSFELLHAPATVCGPKKSTNLVKNKCVNFNFNGLTGTGVLTESNKKFLPFQQFGRDIADTTDAVRDPQTLEILDITPCSFGGVSVITPGTNTSNQVAVLYQGVNCTEVPVAIHADQLTPTWRVYSTGSNVFQTRAGCLIGAEHVNNSYECDIPIGAGICASYQTQTNSPQQAQSVASQSIIAYTMSLGVENSVAYSNNSIAIPTNFTISVTTEILPVSMTKTSVDCTMYICGDSTECSNLLLQYGSFCTQLNRALTGIAVEQDKNTQEVFAQVKQIYKTPPIKDFGGFNFSQILPDPSKPSKRSFIEDLLFNKVTLADAGFIKQYGDCLGDIAARDLICAQKFNGLTVLPPLLTDEMIAQYTSALLAGTITSGWTFGAGAALQIPFAMQMAYRFNGIGVTQNVLYENQKLIANQFNSAIGKIQDSLSSTASALGKLQDVVNQNAQALNTLVKQLSSNFGAISSVLNDILSRLDPPEAEVQIDRLITGRLQSLQTYVTQQLIRAAEIRASANLAATKMSECVLGQSKRVDFCGKGYHLMSFPQSAPHGVVFLHVTYVPAQEKNFTTAPAICHDGKAHFPREGVFVSNGTHWFVTQRNFYEPQIITTDNTFVSGNCDVVIGIVNNTVYDPLQPELDSFKEELDKYFKNHTSPDVDLGDISGINASVVNIQKEIDRLNEVAKNLNESLIDLQELGKYEQYIKWPWYIWLGFIAGLIAIVMVTIMLCCMTSCCSCLKGCCSCGSCCKFDEDDSEPVLKGVKLHYT

SEQ ID NO: 159 - protein, 1271 aa, synthetic construct
  REGION 1..1271: note = recombinant coronavirus Spike (S) polypeptide
MFVFLVLLPLVSSQCVNLTTRTQLPPAYTNSFTRGVYYPDKVFRSSVLHSTQDLFLPFFSNVTWFHVIHVSGTNGTKRFDNPVLPFNDGVYFASIEKSNIIRGWIFGTTLDSKTQSLLIVNNATNVVIKVCEFQFCNDPFLDVYYHKNNKSWMESEFRVYSSANNCTFEYVSQPFLMDLEGKQGNFKNLREFVFKNIDGYFKIYSKHTPINIVRDLPQGFSALEPLVDLPIGINITRFQTLLALHRSYLPGDSSSGWTAGAAAYYVGYLQPRTFLLKYNENGTITDAVDCALDPLSETKCTLKSFTVEKGIYQTSNFRVQPTESIVRFPNITNLCPFDEVFNATRFASVYAWNRKRISNCVADYSVLYNLAPFFTFKCYGVSPTKLNDLCFTNVYADSFVIRGDEVRQIAPGQTGNIADYNYKLPDDFTGCVIAWNSNKLDSKVSGNYNYLYRLFRKSNLKPFERDISTEIYQAGNKPCNGVAGFNCYFPLRSYSFRPTYGVGHQPYRVVVLSFELLHAPATVCGPKKSTNLVKNKCVNFNFNGLKGTGVLTESNKKFLPFQQFGRDIADTTDAVRDPQTLEILDITPCSFGGVSVITPGTNTSNQVAVLYQGVNCTEVPVAIHADQLTPTWRVYSTGSNVFQTRAGCLIGAEYVNNSYECDIPIGAGICASYQTQTKSHQQAQSVASQSIIAYTMSLGAENSVAYSNNSIAIPTNFTISVTTEILPVSMTKTSVDCTMYICGDSTECSNLLLQYGSFCTQLKRALTGIAVEQDKNTQEVFAQVKQIYKTPPIKYFGGFNFSQILPDPSKPSKRSFIEDLLFNKVTLADAGFIKQYGDCLGDIAARDLICAQKFKGLTVLPPLLTDEMIAQYTSALLAGTITSGWTFGAGAALQIPFAMQMAYRFNGIGVTQNVLYENQKLIANQFNSAIGKIQDSLSSTASALGKLQDVVNHNAQALNTLVKQLSSKFGAISSVLNDIFSRLDPPEAEVQIDRLITGRLQSLQTYVTQQLIRAAEIRASANLAATKMSECVLGQSKRVDFCGKGYHLMSFPQSAPHGVVFLHVTYVPAQEKNFTTAPAICHDGKAHFPREGVFVSNGTHWFVTQRNFYEPQIITTDNTFVSGNCDVVIGIVNNTVYDPLQPELDSFKELDKYFKNHTSPDVDLGDISGINASVVNIQKEIDRLNEVAKNLNESLIDLQELGKYEQYIKWPWYIWLGFIAGLIAIVMVTIMLCCMTSCCSCLKGCCSCGSCCKFDEDDSEPVLKGVKLHYT

SEQ ID NO: 160 - protein, 1270 aa, synthetic construct
  REGION 1..1270: note = recombinant coronavirus Spike (S) polypeptide
MFVFLVLLPLVSSQCVNLTTRTQLPPAYTNSFTRGVYYPDKVFRSSVLHSTQDLFLPFFSNVTWFHVISGTNGTKRFDNPVLPFNDGVYFASIEKSNIIRGWIFGTTLDSKTQSLLIVNNATNVVIKVCEFQFCNDPFLDHKNNKSWMESEFRVYSSANNCTFEYVSQPFLMDLEGKQGNFKNLREFVFKNIDGYFKIYSKHTPIIVREPEDLPQGFSALEPLVDLPIGINITRFQTLLALHRSYLTPGDSSSGWTAGAAAYYVGYLQPRTFLLKYNENGTITDAVDCALDPLSETKCTLKSFTVEKGIYQTSNFRVQPTESIVRFPNITNLCPFDEVFNATRFASVYAWNRKRISNCVADYSVLYNLAPFFTFKCYGVSPTKLNDLCFTNVYADSFVIRGDEVRQIAPGQTGNIADYNYKLPDDFTGCVIAWNSNKLDSKVSGNYNYLYRLFRKSNLKPFERDISTEIYQAGNKPCNGVAGFNCYFPLRSYSFRPTYGVGHQPYRVVVLSFELLHAPATVCGPKKSTNLVKNKCVNFNFNGLKGTGVLTESNKKFLPFQQFGRDIADTTDAVRDPQTLEILDITPCSFGGVSVITPGTNTSNQVAVLYQGVNCTEVPVAIHADQLTPTWRVYSTGSNVFQTRAGCLIGAEYVNNSYECDIPIGAGICASYQTQTKSHQQAQSVASQSIIAYTMSLGAENSVAYSNNSIAIPTNFTISVTTEILPVSMTKTSVDCTMYICGDSTECSNLLLQYGSFCTQLKRALTGIAVEQDKNTQEVFAQVKQIYKTPPIKYFGGFNFSQILPDPSKPSKRSFIEDLLFNKVTLADAGFIKQYGDCLGDIAARDLICAQKFKGLTVLPPLLTDEMIAQYTSALLAGTITSGWTFGAGAALQIPFAMQMAYRFNGIGVTQNVLYENQKLIANQFNSAIGKIQDSLSSTASALGKLQDVVNHNAQALNTLVKQLSSKFGAISSVLNDIFSRLDPPEAEVQIDRLITGRLQSLQTYVTQQLIRAAEIRASANLAATKMSECVLGQSKRVDFCGKGYHLMSFPQSAPHGVVFLHVTYVPAQEKNFTTAPAICHDGKAHFPREGVFVSNGTHWFVTQRNFYEPQIITTDNTFVSGNCDVVIGIVNNTVYDPLQPELDSFKEELDKYFKNHTSPDVDLGDISGINASVVNIQKEIDRLNEVAKNLNESLIDLQELGKYEQYIKWPWYIWLGFIAGLIAIVMVTIMLCCMTSCCSCLKGCCSCGSCCKFDEDDSEPVLKGVKLHYT

SEQ ID NO: 161 - DNA, 3819 bp, synthetic construct
  misc_feature 1..3819: note = encodes recombinant coronavirus Spike (S) polypeptide
  source 1..3819: mol_type = other DNA
atgtttgtattcttagtattgctgcccctagtgagcagccagtgtgttaatctgacgacgcggacccaacttcctccagcctacacaaactcttttacgcgcggggtctattacccggacaaagtgttccgttcgagtgttttgcatagcacccaggatttattcctaccattcttttcaaatgttacctggttccatgtgattcacgtctccggtactaatggaactaaacggttcgacaaccccgttttgccgttcaacgatggggtgtacttcgcttctattgagaagtcgaatatcatacgtgggtggattttcggcacgaccttggatagtaaaactcagtcgttacttatagtaaataatgctaccaatgttgtgattaaggtgtgtgagttccagttttgtaatgatccctttcttgacgtctattatcataaaaataacaaatcatggatggaatcggagtttcgggtgtattcctctgcgaacaactgtacatttgaatatgtgtctcagccgttcctgatggatttggagggtaagcaaggcaactttaagaatttgcgagagttcgtcttcaagaacatagatggatactttaaaatttatagcaagcacacaccgattaatatagtgcgagaccttcctcaaggtttctcggcccttgagccgctagtggacctgcccattggaattaatatcacccggtttcagactctgcttgcccttcatcgttcttatctgacccctggcgattcttcatcaggatggacggctggggctgccgcctattatgtcggataccttcaaccaaggacttttctcctcaagtataacgagaacggaacaattacagatgcagtcgattgcgccctagaccctctgtcggaaacgaagtgcaccttgaagagttttacagtagagaaggggatttaccagaccagtaacttcagggtccaaccgaccgaatccatcgtccgatttccaaatataactaatttatgtccgtttgacgaggtcttcaacgcaactcggttcgcgtcagtttatgcgtggaaccgcaaaagaataagcaactgcgtagctgactattccgttctctacaactctgcgccgttttttacttttaaatgctatggagtaagtccaacaaaattaaatgatctatgttttacaaatgtgtacgcagactcgtttgtaataaggggtgacgaagttcgtcagatagcaccagggcaaactgggaatattgcagactacaactataagctacccgatgacttcactggctgcgtcatcgcttggaatagtaataaattagatagtaaggtgagtgggaattataattacctatatcgtctctttagaaaaagtaacctcaagccattcgaacgcgacatttctacagaaatctatcaagctggcaataaaccttgcaacggtgtcgcgggcttcaactgctactttccccttaggtcgtactcttttcgacctacctatggtgtgggccaccagccctatagagttgttgtcctatcttttgaactattacatgccccagcgacggtatgcggacccaagaagtcgactaatttagtaaagaacaaatgcgttaattttaattttaatggccttaaagggacaggtgttttaacggaatcgaataaaaaattcttacctttccagcaatttggacgcgacatagctgatacgacggatgcagtcagagaccctcagacactggagatactggacataaccccgtgcagcttcgggggagtctccgtaataacccctgggacgaacacatccaatcaggtagcagtattatatcaaggcgtcaattgtacagaagttcctgtcgctatccatgcagatcaactcaccccgacctggcgcgtttatagcactgggagtaatgtattccaaactcgtgcaggatgtcttatcggggctgaatacgtgaataactcatacgagtgtgacattccaattggagctggcatatgtgccagctatcaaactcaaacgaagtcccaccaacaggcacagtctgtcgcgtctcaatcgatcattgcctatacaatgagtcttggtgccgaaaattcagttgcatatagcaacaactcaatagcgatacctactaatttcacaatcagtgtgaccaccgaaattctcccagtatcgatgacaaagacatccgtggattgtactatgtacatctgtggagactcgacggagtgctccaacttactccttcagtacgggtccttttgcactcaattaaagagggccctaacaggcattgctgttgagcaagacaagaacacgcaagaggtatttgcacaggtgaagcaaatatacaagacaccaccaattaagtactttggaggttttaacttctctcagatactcccagatcccagcaaaccctctaaacggagcttcatagaagacctcttgtttaataaagtgactttagctgatgcaggctttatcaagcaatatggggattgtttgggggatattgccgcccgcgacctcatctgcgcccagaaattcaagggtctaacagtattaccaccgctcctgacagacgagatgatcgctcaatacacttctgcgctgttggccgggacaattacgtctgggtggaccttcggcgcaggtgccgccttgcagatcccatttgcgatgcaaatggcgtatcgttttaacggtataggtgtcacacaaaacgtattatacgaaaaccagaaactaatagctaaccaatttaactcagcaataggaaaaatacaggattctctttcctctacggcgagcgccctcgggaaacttcaggatgtagtgaaccataacgctcaagcacttaataccctggttaagcaactatcaagcaagttcggtgctatctcatcagtgcttaatgacatcttcagtcgactagatcccccggaagcagaagttcaaatcgacagattgataactggccgcttgcaatctctacaaacatacgttacccagcagctgattcgggctgcggaaatccgagcatcggccaacctcgccgcgactaaaatgagcgagtgcgtattgggccagagtaaaagggttgacttctgcggtaagggctaccaccttatgagttttccgcagagtgcgcctcacggagttgtcttcctccacgtgacgtatgtgccggcacaggaaaaaaatttcaccaccgcccctgcgatatgtcatgatggtaaggcgcactttccaagagagggtgtctttgtttcaaatggaacccactggttcgttactcaacgtaatttttacgaacctcagattatcactacggataatacgttcgtgtcaggaaactgcgacgtggtaattggtatagtaaataatactgtgtatgatcccctccagccggagctggactcattcaaagaggaattagataagtacttcaaaaatcacacaagccctgatgtggacttgggagatatctcaggaattaacgcttccgttgtcaacatccaaaaagagatagacaggctgaatgaagtagcgaaaaacctgaacgaatccctgattgacttgcaagagctgggcaaatacgaacagtatattaaatggccctggtatatttggttggggttcatcgctggtttaatcgctattgttatggtcaccattatgctttgttgtatgacgtcctgttgttcttgtctaaagggctgctgttcgtgcggttcctgctgtaaattcgatgaggatgactccgaacccgttctgaaaggcgtcaagctccattatact

SEQ ID NO: 162 - DNA, 3810 bp, synthetic construct
  misc_feature 1..3810: note = encodes recombinant coronavirus Spike (S) polypeptide
  source 1..3810: mol_type = other DNA
atgtttgtttttctcgtactacttccactagtatctagccaatgtgtaaatttaaccacgaggacgcagctgcctccggcatatacgaatagtttcactaggggagtctattatccagataaagtgttccgaagcagtgttctacattcaacacaggacctcttccttcctttctttagcaacgtcacgtggttccatgtcataagcggcacaaacggcacaaagcgcttcgataatccggtgcttccgtttaacgatggggtttattttgcttctattgaaaagagcaacattatacgcggttggatcttcggaactacattggatagtaaaacgcaatcattgctaatcgttaataacgcgactaatgtagtgattaaggtgtgcgagttccagttttgcaatgacccctttttggatcataaaaataataaatcgtggatggaatcagaatttcgtgtatattcaagcgcaaacaactgtacgttcgagtacgtgagtcagcccttcttgatggatctggaagggaagcagggcaattttaaaaacttacgtgagtttgtatttaagaatatcgacgggtatttcaagatttactcaaagcacacaccgattattgttcgagagccggaagatttaccccaaggcttctcagcactggaacccttggtagacctacctatcggtattaatataacccgcttccaaaccttgttagcgctgcatcggagttatttaacccccggagactcatcgagcgggtggaccgccggggctgcagcttattacgtggggtatttacaaccacggacgttcttactcaagtacaacgagaacgggacgattactgatgccgtcgactgtgctttggacccgctgagcgaaaccaagtgcacactcaagtctttcacggtagagaaggggatctaccagacatcaaattttcgggtacaaccaacggagtccatcgtacgctttccgaatatcacgaatctttgtccattcgatgaggtattcaatgctacgcgttttgcgagtgtgtacgcgtggaataggaagcgtatctcaaattgcgtcgctgattactccgtactctataacagcgcgcccttctttaccttcaaatgctacggggtttctcctactaaactaaacgatctatgttttacgaacgtctacgcagacagctttgttatacgaggggacgaggttcggcagatcgcccccggccaaacaggaaacatcgccgactataattacaaactcccagatgactttactggttgcgtaattgcgtggaactctaacaagttagactccaaggtctcgggaaactacaattacctgtaccgtctcttcagaaaatctaacttaaagcctttcgagcgagatattagcactgaaatctatcaggcgggtaataaaccctgtaacggggtcgccggttttaactgctactttcctcttcggtcgtattcctttcgcccgacctatggagttggacaccaaccttatagagtcgttgttctaagttttgaattgctccatgccccggcgacggtatgcgggccaaagaaaagtactaatctcgttaagaataaatgtgtgaatttcaactttaacggacttaaaggtacgggcgtattgaccgagtcaaataaaaagtttttacccttccagcaatttggtagggatatcgcggatactactgacgcagtgagagatccacaaacacttgaaatcctagacatcaccccttgtagttttgggggagtgtctgtaatcacccctggtacaaacacttctaaccaagtcgcggttctttatcagggtgttaattgtacagaagtgcctgtcgccattcatgcagaccagctgacgcccacttggcgcgtctactcgacgggatctaatgtctttcagactcgagctggatgcctcatcggggcagaatacgtgaacaactcctatgaatgcgatattcctatcggtgctggcatttgcgcatcttatcaaacacagaccaaaagtcatcagcaagcgcaatccgttgccagtcaatctataattgcgtatacaatgtccttgggcgcggaaaattcagtcgcgtatagcaacaattctatcgctattccaacgaattttactatatcggtcacaacagagatactaccagtgtcgatgactaagacttcggtagattgcacaatgtacatatgcggagacagcacagaatgctcgaacctacttcttcaatatggttctttttgcactcagctcaagagagctcttactggcatagcagtggagcaagataaaaatacccaggaagtgtttgctcaagtaaaacagatatataaaacccctccgatcaaatattttggaggttttaacttctcacaaatactaccggacccttccaaaccatcgaaacggtccttcatagaggacttgctctttaataaggtaactttggcggatgctggttttataaagcagtatggagattgtcttggtgacatagcggccagagacctcatctgtgcacagaaattcaaaggtctaacagtacttccgcccctgctaacggacgagatgatagctcaatacaccagtgcccttctggctggaacgataaccagtggatggaccttcggcgcaggtgccgcactgcagattccgttcgcaatgcagatggcctatcggtttaatgggatcggcgtcactcaaaatgtattgtacgaaaatcagaaactcattgccaaccaattcaattcagcgataggcaagatccaggacagtctctcttccaccgcctccgccttaggtaagctacaagatgttgttaatcataacgctcaagcattgaatacgctggtaaaacaattgagcagcaaattcggcgcaattagctcagttttgaacgacatattctcccgacttgacccccccgaagctgaagtccaaatagataggctgataaccgggaggctacagtcactccaaacctacgtgactcaacagctcataagagcagccgaaataagagcctctgctaatctcgccgcgactaagatgtcagagtgtgttttaggtcaaagtaaaagggttgatttctgtggtaagggataccaccttatgtcctttccacaatcggctccacacggtgtggtctttctgcacgttacttatgtcccggctcaggagaagaatttcaccacagccccggctatttgtcatgacggcaaggcgcacttccccagagaaggcgtattcgtcagtaacggcactcactggttcgttactcaacgtaacttctacgaacctcagattataacgacagacaacacatttgtatcagggaactgtgatgtggtgatcggtatagtgaacaacacagtgtacgacccattacagccggagttagattctttcaaggaagagctggataagtacttcaagaatcacacctcgccagatgttgaccttggtgatatttcaggtataaacgcctctgtcgtgaatatccagaaagagatcgaccgtctcaacgaagtagcgaaaaatctaaacgaatcgttaattgaccttcaggagctggggaagtatgagcagtacattaagtggccctggtacatttggctgggctttattgcaggactgatagcaatagtgatggtcaccattatgttgtgctgcatgacatcctgctgctcttgtttaaaagggtgttgtagttgtggatcgtgttgcaagttcgacgaggatgattccgaacctgttctgaaaggcgtaaaattacactacaca

SEQ ID NO: 163 - DNA, 9308 bp, synthetic construct
  misc_feature 1..9308: note = encodes recombinant coronavirus Spike (S) polypeptide
  source 1..9308: mol_type = other DNA
ggaacggctccgcccactattaatgaaattaaaaattccaattttaaaaaacgcagcaagagaaacatttgtatgaaagaatgcgtagaaggaaagaaaaatgtcgtcgacatgctgaacaacaagattaatatgcctccgtgtataaaaaaaatattgaacgatttgaaagaaaacaatgtaccgcgcggcggtatgtacaggaagaggtttatactaaactgttacattgcaaacgtggtttcgtgtgccaagtgtgaaaaccgatgtttaatcaaggctctgacgcatttctacaaccacgactccaagtgtgtgggtgaagtcatgcatcttttaatcaaatcccaagatgtgtataaaccaccaaactgccaaaaaatgaaaactgtcgacaagctctgtccgtttgctggcaactgcaagggtctcaatcctatttgtaattattgaataataaaacaattataaatgctaaatttgttttttattaacgatacaaaccaaacgcaacaagaacatttgtagtattatctataattgaaaacgcgtagttataatcgctgaggtaatatttaaaatcattttcaaatgattcacagttaatttgcgacaatataattttattttcacataaactagacgccttgtcgtcttcttcttcgtattccttctctttttcatttttctcttcataaaaattaacatagttattatcgtatccatatatgtatctatcgtatagagtaaattttttgttgtcataaatatatatgtcttttttaatggggtgtatagtaccgctgcgcatagtttttctgtaatttacaacagtgctattttctggtagttcttcggagtgtgttgctttaattattaaatttatataatcaatgaatttgggatcgtcggttttgtacaatatgttgccggcatagtacgcagcttcttctagttcaattacaccattttttagcagcaccggattaacataactttccaaaatgttgtacgaaccgttaaacaaaaacagttcacctcccttttctatactattgtctgcgagcagttgtttgttgttaaaaataacagccattgtaatgagacgcacaaactaatatcacaaactggaaatgtctatcaatatatagttgctgatcagatctgatcatggagataattaaaatgataaccatctcgcaaataaataagtattttactgttttcgtaacagttttgtaataaaaaaacctataaatataggatccgccaccatgtttgtattcttagtattgctgcccctagtgagcagccagtgtgttaatctgacgacgcggacccaacttcctccagcctacacaaactcttttacgcgcggggtctattacccggacaaagtgttccgttcgagtgttttgcatagcacccaggatttattcctaccattcttttcaaatgttacctggttccatgtgattcacgtctccggtactaatggaactaaacggttcgacaaccccgttttgccgttcaacgatggggtgtacttcgcttctattgagaagtcgaatatcatacgtgggtggattttcggcacgaccttggatagtaaaactcagtcgttacttatagtaaataatgctaccaatgttgtgattaaggtgtgtgagttccagttttgtaatgatccctttcttgacgtctattatcataaaaataacaaatcatggatggaatcggagtttcgggtgtattcctctgcgaacaactgtacatttgaatatgtgtctcagccgttcctgatggatttggagggtaagcaaggcaactttaagaatttgcgagagttcgtcttcaagaacatagatggatactttaaaatttatagcaagcacacaccgattaatatagtgcgagaccttcctcaaggtttctcggcccttgagccgctagtggacctgcccattggaattaatatcacccggtttcagactctgcttgcccttcatcgttcttatctgacccctggcgattcttcatcaggatggacggctggggctgccgcctattatgtcggataccttcaaccaaggacttttctcctcaagtataacgagaacggaacaattacagatgcagtcgattgcgccctagaccctctgtcggaaacgaagtgcaccttgaagagttttacagtagagaaggggatttaccagaccagtaacttcagggtccaaccgaccgaatccatcgtccgatttccaaatataactaatttatgtccgtttgacgaggtcttcaacgcaactcggttcgcgtcagtttatgcgtggaaccgcaaaagaataagcaactgcgtagctgactattccgttctctacaactctgcgccgttttttacttttaaatgctatggagtaagtccaacaaaattaaatgatctatgttttacaaatgtgtacgcagactcgtttgtaataaggggtgacgaagttcgtcagatagcaccagggcaaactgggaatattgcagactacaactataagctacccgatgacttcactggctgcgtcatcgcttggaatagtaataaattagatagtaaggtgagtgggaattataattacctatatcgtctctttagaaaaagtaacctcaagccattcgaacgcgacatttctacagaaatctatcaagctggcaataaaccttgcaacggtgtcgcgggcttcaactgctactttccccttaggtcgtactcttttcgacctacctatggtgtgggccaccagccctatagagttgttgtcctatcttttgaactattacatgccccagcgacggtatgcggacccaagaagtcgactaatttagtaaagaacaaatgcgttaattttaattttaatggccttaaagggacaggtgttttaacggaatcgaataaaaaattcttacctttccagcaatttggacgcgacatagctgatacgacggatgcagtcagagaccctcagacactggagatactggacataaccccgtgcagcttcgggggagtctccgtaataacccctgggacgaacacatccaatcaggtagcagtattatatcaaggcgtcaattgtacagaagttcctgtcgctatccatgcagatcaactcaccccgacctggcgcgtttatagcactgggagtaatgtattccaaactcgtgcaggatgtcttatcggggctgaatacgtgaataactcatacgagtgtgacattccaattggagctggcatatgtgccagctatcaaactcaaacgaagtcccaccaacaggcacagtctgtcgcgtctcaatcgatcattgcctatacaatgagtcttggtgccgaaaattcagttgcatatagcaacaactcaatagcgatacctactaatttcacaatcagtgtgaccaccgaaattctcccagtatcgatgacaaagacatccgtggattgtactatgtacatctgtggagactcgacggagtgctccaacttactccttcagtacgggtccttttgcactcaattaaagagggccctaacaggcattgctgttgagcaagacaagaacacgcaagaggtatttgcacaggtgaagcaaatatacaagacaccaccaattaagtactttggaggttttaacttctctcagatactcccagatcccagcaaaccctctaaacggagcttcatagaagacctcttgtttaataaagtgactttagctgatgcaggctttatcaagcaatatggggattgtttgggggatattgccgcccgcgacctcatctgcgcccagaaattcaagggtctaacagtattaccaccgctcctgacagacgagatgatcgctcaatacacttctgcgctgttggccgggacaattacgtctgggtggaccttcggcgcaggtgccgccttgcagatcccatttgcgatgcaaatggcgtatcgttttaacggtataggtgtcacacaaaacgtattatacgaaaaccagaaactaatagctaaccaatttaactcagcaataggaaaaatacaggattctctttcctctacggcgagcgccctcgggaaacttcaggatgtagtgaaccataacgctcaagcacttaataccctggttaagcaactatcaagcaagttcggtgctatctcatcagtgcttaatgacatcttcagtcgactagatcccccggaagcagaagttcaaatcgacagattgataactggccgcttgcaatctctacaaacatacgttacccagcagctgattcgggctgcggaaatccgagcatcggccaacctcgccgcgactaaaatgagcgagtgcgtattgggccagagtaaaagggttgacttctgcggtaagggctaccaccttatgagttttccgcagagtgcgcctcacggagttgtcttcctccacgtgacgtatgtgccggcacaggaaaaaaatttcaccaccgcccctgcgatatgtcatgatggtaaggcgcactttccaagagagggtgtctttgtttcaaatggaacccactggttcgttactcaacgtaatttttacgaacctcagattatcactacggataatacgttcgtgtcaggaaactgcgacgtggtaattggtatagtaaataatactgtgtatgatcccctccagccggagctggactcattcaaagaggaattagataagtacttcaaaaatcacacaagccctgatgtggacttgggagatatctcaggaattaacgcttccgttgtcaacatccaaaaagagatagacaggctgaatgaagtagcgaaaaacctgaacgaatccctgattgacttgcaagagctgggcaaatacgaacagtatattaaatggccctggtatatttggttggggttcatcgctggtttaatcgctattgttatggtcaccattatgctttgttgtatgacgtcctgttgttcttgtctaaagggctgctgttcgtgcggttcctgctgtaaattcgatgaggatgactccgaacccgttctgaaaggcgtcaagctccattatacttaatgaaagcttgtcgagaagtactagaggatcataatcagccataccacatttgtagaggttttacttgctttaaaaaacctcccacacctccccctgaacctgaaacataaaatgaatgcaattgttgttgttaacttgtttattgcagcttataatggttacaaataaagcaatagcatcacaaatttcacaaataaagcatttttttcactgcattctagttgtggtttgtccaaactcatcaatgtatcttatcatgtctggatctgatcactgcttgagcctaggtagctgagcgcatgcaagctgatccgggttattagtacatttattaagcgctagattctgtgcgttgttgatttacagacaattgttgtacgtattttaataattcattaaatttataatctttagggtggtatgttagagcgaaaatcaaatgattttcagcgtctttatatctgaatttaaatattaaatcctcaatagatttgtaaaataggtttcgattagtttcaaacaagggttgtttttccgaaccgatggctggactatctaatggattttcgctcaacgccacaaaacttgccaaatcttgtagcagcaatctagctttgtcgatattcgtttgtgttttgttttgtaataaaggttcgacgtcgttcaaaatattatgcgcttttgtatttctttcatcactgtcgttagtgtacaattgactcgacgtaaacacgttaaatagagcttggacatatttaacatcgggcgtgttagctttattaggccgattatcgtcgtcgtcccaaccctcgtcgttagaagttgcttccgaagacgattttgccatagccacacgacgcctattaattgtgtcggctaacacgtccgcgatcaaatttgtagttgagctttttggaattatttctgattgcgggcgtttttgggcgggtttcaatctaactgtgcccgattttaattcagacaacacgttagaaagcgatggtgcaggcggtggtaacatttcagacggcaaatctactaatggcggcggtggtggagctgatgataaatctaccatcggtggaggcgcaggcggggctggcggcggaggcggaggcggaggtggtggcggtgatgcagacggcggtttaggctcaaatgtctctttaggcaacacagtcggcacctcaactattgtactggtttcgggcgccgtttttggtttgaccggtctgagacgagtgcgatttttttcgtttctaatagcttccaacaattgttgtctgtcgtctaaaggtgcagcgggttgaggttccgtcggcattggtggagcgggcggcaattcagacatcgatggtggtggtggtggtggaggcgctggaatgttaggcacgggagaaggtggtggcggcggtgccgccggtataatttgttctggtttagtttgttcgcgcacgattgtgggcaccggcgcaggcgccgctggctgcacaacggaaggtcgtctgcttcgaggcagcgcttggggtggtggcaattcaatattataattggaatacaaatcgtaaaaatctgctataagcattgtaatttcgctatcgtttaccgtgccgatatttaacaaccgctcaatgtaagcaattgtattgtaaagagattgtctcaagctcggatcgatcccgcacgccgataacaagccttttcatttttactacagcattgtagtggcgagacacttcgctgtcgtcgaggtttaaacgcttcctcgctcactgactcgctgcgctcggtcgttcggctgcggcgagcggtatcagctcactcaaaggcggtaatacggttatccacagaatcaggggataacgcaggaaagaacatgtgagcaaaaggccagcaaaaggccaggaaccgtaaaaaggccgcgttgctggcgtttttccataggctccgcccccctgacgagcatcacaaaaatcgacgctcaagtcagaggtggcgaaacccgacaggactataaagataccaggcgtttccccctggaagctccctcgtgcgctctcctgttccgaccctgccgcttaccggatacctgtccgcctttctcccttcgggaagcgtggcgctttctcatagctcacgctgtaggtatctcagttcggtgtaggtcgttcgctccaagctgggctgtgtgcacgaaccccccgttcagcccgaccgctgcgccttatccggtaactatcgtcttgagtccaacccggtaagacacgacttatcgccactggcagcagccactggtaacaggattagcagagcgaggtatgtaggcggtgctacagagttcttgaagtggtggcctaactacggctacactagaaggacagtatttggtatctgcgctctgctgaagccagttaccttcggaaaaagagttggtagctcttgatccggcaaacaaaccaccgctggtagcggtggtttttttgtttgcaagcagcagattacgcgcagaaaaaaaggatctcaagaagatcctttgatcttttctacggggtctgacgctcagtggaacgaaaactcacgttaagggattttggtcatgagattatcaaaaaggatcttcacctagatccttttaaattaaaaatgaagttttaaatcaatctaaagtatatatgagtaaacttggtctgacagttaccaatgcttaatcagtgaggcacctatctcagcgatctgtctatttcgttcatccatagttgcctgactccccgtcgtgtagataactacgatacgggagggcttaccatctggccccagtgctgcaatgataccgcgagacccacgctcaccggctccagatttatcagcaataaaccagccagccggaagggccgagcgcagaagtggtcctgcaactttatccgcctccatccagtctattaattgttgccgggaagctagagtaagtagttcgccagttaatagtttgcgcaacgttgttgccattgctacaggcatcgtggtgtcacgctcgtcgtttggtatggcttcattcagctccggttcccaacgatcaaggcgagttacatgatcccccatgttgtgcaaaaaagcggttagctccttcggtcctccgatcgttgtcagaagtaagttggccgcagtgttatcactcatggttatggcagcactgcataattctcttactgtcatgccatccgtaagatgcttttctgtgactggtgagtactcaaccaagtcattctgagaatagtgtatgcggcgaccgagttgctcttgcccggcgtcaatacgggataataccgcgccacatagcagaactttaaaagtgctcatcattggaaaacgttcttcggggcgaaaactctcaaggatcttaccgctgttgagatccagttcgatgtaacccactcgtgcacccaactgatcttcagcatcttttactttcaccagcgtttctgggtgagcaaaaacaggaaggcaaaatgccgcaaaaaagggaataagggcgacacggaaatgttgaatactcatactcttcctttttcaatattattgaagcatttatcagggttattgtctcatgagcggatacatatttgaatgtatttagaaaaataaacaaataggggttccgcgcacatttccccgaaaagtgccacctgacgcgccctgtagcggcgcattaagcgcggcgggtgtggtggttacgcgcagcgtgaccgctacacttgccagcgccctagcgcccgctcctttcgctttcttcccttcctttctcgccacgttcgccggctttccccgtcaagctctaaatcgggggctccctttagggttccgatttagtgctttacggcacctcgaccccaaaaaacttgattagggtgatggttcacgtagtgggccatcgccctgatagacggtttttcgccctttgacgttggagtccacgttctttaatagtggactcttgttccaaactggaacaacactcaaccctatctcggtctattcttttgatttataagggattttgccgatttcggcctattggttaaaaaatgagctgatttaacaaaaatttaacgcgaattttaacaaaatattaacgtttacaatttcccattcgccattcaggctgcgcaactgttgggaagggcgatcggtgcgggcctcttcgctattacgcca

SEQ ID NO: 164 - DNA, 9299 bp, synthetic construct
  misc_feature 1..9299: note = encodes recombinant coronavirus Spike (S) polypeptide
  source 1..9299: mol_type = other DNA
ggaacggctccgcccactattaatgaaattaaaaattccaattttaaaaaacgcagcaagagaaacatttgtatgaaagaatgcgtagaaggaaagaaaaatgtcgtcgacatgctgaacaacaagattaatatgcctccgtgtataaaaaaaatattgaacgatttgaaagaaaacaatgtaccgcgcggcggtatgtacaggaagaggtttatactaaactgttacattgcaaacgtggtttcgtgtgccaagtgtgaaaaccgatgtttaatcaaggctctgacgcatttctacaaccacgactccaagtgtgtgggtgaagtcatgcatcttttaatcaaatcccaagatgtgtataaaccaccaaactgccaaaaaatgaaaactgtcgacaagctctgtccgtttgctggcaactgcaagggtctcaatcctatttgtaattattgaataataaaacaattataaatgctaaatttgttttttattaacgatacaaaccaaacgcaacaagaacatttgtagtattatctataattgaaaacgcgtagttataatcgctgaggtaatatttaaaatcattttcaaatgattcacagttaatttgcgacaatataattttattttcacataaactagacgccttgtcgtcttcttcttcgtattccttctctttttcatttttctcttcataaaaattaacatagttattatcgtatccatatatgtatctatcgtatagagtaaattttttgttgtcataaatatatatgtcttttttaatggggtgtatagtaccgctgcgcatagtttttctgtaatttacaacagtgctattttctggtagttcttcggagtgtgttgctttaattattaaatttatataatcaatgaatttgggatcgtcggttttgtacaatatgttgccggcatagtacgcagcttcttctagttcaattacaccattttttagcagcaccggattaacataactttccaaaatgttgtacgaaccgttaaacaaaaacagttcacctcccttttctatactattgtctgcgagcagttgtttgttgttaaaaataacagccattgtaatgagacgcacaaactaatatcacaaactggaaatgtctatcaatatatagttgctgatcagatctgatcatggagataattaaaatgataaccatctcgcaaataaataagtattttactgttttcgtaacagttttgtaataaaaaaacctataaatataggatccgccaccatgtttgtttttctcgtactacttccactagtatctagccaatgtgtaaatttaaccacgaggacgcagctgcctccggcatatacgaatagtttcactaggggagtctattatccagataaagtgttccgaagcagtgttctacattcaacacaggacctcttccttcctttctttagcaacgtcacgtggttccatgtcataagcggcacaaacggcacaaagcgcttcgataatccggtgcttccgtttaacgatggggtttattttgcttctattgaaaagagcaacattatacgcggttggatcttcggaactacattggatagtaaaacgcaatcattgctaatcgttaataacgcgactaatgtagtgattaaggtgtgcgagttccagttttgcaatgacccctttttggatcataaaaataataaatcgtggatggaatcagaatttcgtgtatattcaagcgcaaacaactgtacgttcgagtacgtgagtcagcccttcttgatggatctggaagggaagcagggcaattttaaaaacttacgtgagtttgtatttaagaatatcgacgggtatttcaagatttactcaaagcacacaccgattattgttcgagagccggaagatttaccccaaggcttctcagcactggaacccttggtagacctacctatcggtattaatataacccgcttccaaaccttgttagcgctgcatcggagttatttaacccccggagactcatcgagcgggtggaccgccggggctgcagcttattacgtggggtatttacaaccacggacgttcttactcaagtacaacgagaacgggacgattactgatgccgtcgactgtgctttggacccgctgagcgaaaccaagtgcacactcaagtctttcacggtagagaaggggatctaccagacatcaaattttcgggtacaaccaacggagtccatcgtacgctttccgaatatcacgaatctttgtccattcgatgaggtattcaatgctacgcgttttgcgagtgtgtacgcgtggaataggaagcgtatctcaaattgcgtcgctgattactccgtactctataacagcgcgcccttctttaccttcaaatgctacggggtttctcctactaaactaaacgatctatgttttacgaacgtctacgcagacagctttgttatacgaggggacgaggttcggcagatcgcccccggccaaacaggaaacatcgccgactataattacaaactcccagatgactttactggttgcgtaattgcgtggaactctaacaagttagactccaaggtctcgggaaactacaattacctgtaccgtctcttcagaaaatctaacttaaagcctttcgagcgagatattagcactgaaatctatcaggcgggtaataaaccctgtaacggggtcgccggttttaactgctactttcctcttcggtcgtattcctttcgcccgacctatggagttggacaccaaccttatagagtcgttgttctaagttttgaattgctccatgccccggcgacggtatgcgggccaaagaaaagtactaatctcgttaagaataaatgtgtgaatttcaactttaacggacttaaaggtacgggcgtattgaccgagtcaaataaaaagtttttacccttccagcaatttggtagggatatcgcggatactactgacgcagtgagagatccacaaacacttgaaatcctagacatcaccccttgtagttttgggggagtgtctgtaatcacccctggtacaaacacttctaaccaagtcgcggttctttatcagggtgttaattgtacagaagtgcctgtcgccattcatgcagaccagctgacgcccacttggcgcgtctactcgacgggatctaatgtctttcagactcgagctggatgcctcatcggggcagaatacgtgaacaactcctatgaatgcgatattcctatcggtgctggcatttgcgcatcttatcaaacacagaccaaaagtcatcagcaagcgcaatccgttgccagtcaatctataattgcgtatacaatgtccttgggcgcggaaaattcagtcgcgtatagcaacaattctatcgctattccaacgaattttactatatcggtcacaacagagatactaccagtgtcgatgactaagacttcggtagattgcacaatgtacatatgcggagacagcacagaatgctcgaacctacttcttcaatatggttctttttgcactcagctcaagagagctcttactggcatagcagtggagcaagataaaaatacccaggaagtgtttgctcaagtaaaacagatatataaaacccctccgatcaaatattttggaggttttaacttctcacaaatactaccggacccttccaaaccatcgaaacggtccttcatagaggacttgctctttaataaggtaactttggcggatgctggttttataaagcagtatggagattgtcttggtgacatagcggccagagacctcatctgtgcacagaaattcaaaggtctaacagtacttccgcccctgctaacggacgagatgatagctcaatacaccagtgcccttctggctggaacgataaccagtggatggaccttcggcgcaggtgccgcactgcagattccgttcgcaatgcagatggcctatcggtttaatgggatcggcgtcactcaaaatgtattgtacgaaaatcagaaactcattgccaaccaattcaattcagcgataggcaagatccaggacagtctctcttccaccgcctccgccttaggtaagctacaagatgttgttaatcataacgctcaagcattgaatacgctggtaaaacaattgagcagcaaattcggcgcaattagctcagttttgaacgacatattctcccgacttgacccccccgaagctgaagtccaaatagataggctgataaccgggaggctacagtcactccaaacctacgtgactcaacagctcataagagcagccgaaataagagcctctgctaatctcgccgcgactaagatgtcagagtgtgttttaggtcaaagtaaaagggttgatttctgtggtaagggataccaccttatgtcctttccacaatcggctccacacggtgtggtctttctgcacgttacttatgtcccggctcaggagaagaatttcaccacagccccggctatttgtcatgacggcaaggcgcacttccccagagaaggcgtattcgtcagtaacggcactcactggttcgttactcaacgtaacttctacgaacctcagattataacgacagacaacacatttgtatcagggaactgtgatgtggtgatcggtatagtgaacaacacagtgtacgacccattacagccggagttagattctttcaaggaagagctggataagtacttcaagaatcacacctcgccagatgttgaccttggtgatatttcaggtataaacgcctctgtcgtgaatatccagaaagagatcgaccgtctcaacgaagtagcgaaaaatctaaacgaatcgttaattgaccttcaggagctggggaagtatgagcagtacattaagtggccctggtacatttggctgggctttattgcaggactgatagcaatagtgatggtcaccattatgttgtgctgcatgacatcctgctgctcttgtttaaaagggtgttgtagttgtggatcgtgttgcaagttcgacgaggatgattccgaacctgttctgaaaggcgtaaaattacactacacataatgaaagcttgtcgagaagtactagaggatcataatcagccataccacatttgtagaggttttacttgctttaaaaaacctcccacacctccccctgaacctgaaacataaaatgaatgcaattgttgttgttaacttgtttattgcagcttataatggttacaaataaagcaatagcatcacaaatttcacaaataaagcatttttttcactgcattctagttgtggtttgtccaaactcatcaatgtatcttatcatgtctggatctgatcactgcttgagcctaggtagctgagcgcatgcaagctgatccgggttattagtacatttattaagcgctagattctgtgcgttgttgatttacagacaattgttgtacgtattttaataattcattaaatttataatctttagggtggtatgttagagcgaaaatcaaatgattttcagcgtctttatatctgaatttaaatattaaatcctcaatagatttgtaaaataggtttcgattagtttcaaacaagggttgtttttccgaaccgatggctggactatctaatggattttcgctcaacgccacaaaacttgccaaatcttgtagcagcaatctagctttgtcgatattcgtttgtgttttgttttgtaataaaggttcgacgtcgttcaaaatattatgcgcttttgtatttctttcatcactgtcgttagtgtacaattgactcgacgtaaacacgttaaatagagcttggacatatttaacatcgggcgtgttagctttattaggccgattatcgtcgtcgtcccaaccctcgtcgttagaagttgcttccgaagacgattttgccatagccacacgacgcctattaattgtgtcggctaacacgtccgcgatcaaatttgtagttgagctttttggaattatttctgattgcgggcgtttttgggcgggtttcaatctaactgtgcccgattttaattcagacaacacgttagaaagcgatggtgcaggcggtggtaacatttcagacggcaaatctactaatggcggcggtggtggagctgatgataaatctaccatcggtggaggcgcaggcggggctggcggcggaggcggaggcggaggtggtggcggtgatgcagacggcggtttaggctcaaatgtctctttaggcaacacagtcggcacctcaactattgtactggtttcgggcgccgtttttggtttgaccggtctgagacgagtgcgatttttttcgtttctaatagcttccaacaattgttgtctgtcgtctaaaggtgcagcgggttgaggttccgtcggcattggtggagcgggcggcaattcagacatcgatggtggtggtggtggtggaggcgctggaatgttaggcacgggagaaggtggtggcggcggtgccgccggtataatttgttctggtttagtttgttcgcgcacgattgtgggcaccggcgcaggcgccgctggctgcacaacggaaggtcgtctgcttcgaggcagcgcttggggtggtggcaattcaatattataattggaatacaaatcgtaaaaatctgctataagcattgtaatttcgctatcgtttaccgtgccgatatttaacaaccgctcaatgtaagcaattgtattgtaaagagattgtctcaagctcggatcgatcccgcacgccgataacaagccttttcatttttactacagcattgtagtggcgagacacttcgctgtcgtcgaggtttaaacgcttcctcgctcactgactcgctgcgctcggtcgttcggctgcggcgagcggtatcagctcactcaaaggcggtaatacggttatccacagaatcaggggataacgcaggaaagaacatgtgagcaaaaggccagcaaaaggccaggaaccgtaaaaaggccgcgttgctggcgtttttccataggctccgcccccctgacgagcatcacaaaaatcgacgctcaagtcagaggtggcgaaacccgacaggactataaagataccaggcgtttccccctggaagctccctcgtgcgctctcctgttccgaccctgccgcttaccggatacctgtccgcctttctcccttcgggaagcgtggcgctttctcatagctcacgctgtaggtatctcagttcggtgtaggtcgttcgctccaagctgggctgtgtgcacgaaccccccgttcagcccgaccgctgcgccttatccggtaactatcgtcttgagtccaacccggtaagacacgacttatcgccactggcagcagccactggtaacaggattagcagagcgaggtatgtaggcggtgctacagagttcttgaagtggtggcctaactacggctacactagaaggacagtatttggtatctgcgctctgctgaagccagttaccttcggaaaaagagttggtagctcttgatccggcaaacaaaccaccgctggtagcggtggtttttttgtttgcaagcagcagattacgcgcagaaaaaaaggatctcaagaagatcctttgatcttttctacggggtctgacgctcagtggaacgaaaactcacgttaagggattttggtcatgagattatcaaaaaggatcttcacctagatccttttaaattaaaaatgaagttttaaatcaatctaaagtatatatgagtaaacttggtctgacagttaccaatgcttaatcagtgaggcacctatctcagcgatctgtctatttcgttcatccatagttgcctgactccccgtcgtgtagataactacgatacgggagggcttaccatctggccccagtgctgcaatgataccgcgagacccacgctcaccggctccagatttatcagcaataaaccagccagccggaagggccgagcgcagaagtggtcctgcaactttatccgcctccatccagtctattaattgttgccgggaagctagagtaagtagttcgccagttaatagtttgcgcaacgttgttgccattgctacaggcatcgtggtgtcacgctcgtcgtttggtatggcttcattcagctccggttcccaacgatcaaggcgagttacatgatcccccatgttgtgcaaaaaagcggttagctccttcggtcctccgatcgttgtcagaagtaagttggccgcagtgttatcactcatggttatggcagcactgcataattctcttactgtcatgccatccgtaagatgcttttctgtgactggtgagtactcaaccaagtcattctgagaatagtgtatgcggcgaccgagttgctcttgcccggcgtcaatacgggataataccgcgccacatagcagaactttaaaagtgctcatcattggaaaacgttcttcggggcgaaaactctcaaggatcttaccgctgttgagatccagttcgatgtaacccactcgtgcacccaactgatcttcagcatcttttactttcaccagcgtttctgggtgagcaaaaacaggaaggcaaaatgccgcaaaaaagggaataagggcgacacggaaatgttgaatactcatactcttcctttttcaatattattgaagcatttatcagggttattgtctcatgagcggatacatatttgaatgtatttagaaaaataaacaaataggggttccgcgcacatttccccgaaaagtgccacctgacgcgccctgtagcggcgcattaagcgcggcgggtgtggtggttacgcgcagcgtgaccgctacacttgccagcgccctagcgcccgctcctttcgctttcttcccttcctttctcgccacgttcgccggctttccccgtcaagctctaaatcgggggctccctttagggttccgatttagtgctttacggcacctcgaccccaaaaaacttgattagggtgatggttcacgtagtgggccatcgccctgatagacggtttttcgccctttgacgttggagtccacgttctttaatagtggactcttgttccaaactggaacaacactcaaccctatctcggtctattcttttgatttataagggattttgccgatttcggcctattggttaaaaaatgagctgatttaacaaaaatttaacgcgaattttaacaaaatattaacgtttacaatttcccattcgccattcaggctgcgcaactgttgggaagggcgatcggtgcgggcctcttcgctattacgcca

SEQ ID NO: 165 - DNA, 3843 bp, synthetic construct
  misc_feature 1..3843: note = encodes recombinant coronavirus Spike (S) polypeptide
  source 1..3843: mol_type = other DNA
ggatccgccaccatgtttgtattcttagtattgctgcccctagtgagcagccagtgtgttaatctgacgacgcggacccaacttcctccagcctacacaaactcttttacgcgcggggtctattacccggacaaagtgttccgttcgagtgttttgcatagcacccaggatttattcctaccattcttttcaaatgttacctggttccatgtgattcacgtctccggtactaatggaactaaacggttcgacaaccccgttttgccgttcaacgatggggtgtacttcgcttctattgagaagtcgaatatcatacgtgggtggattttcggcacgaccttggatagtaaaactcagtcgttacttatagtaaataatgctaccaatgttgtgattaaggtgtgtgagttccagttttgtaatgatccctttcttgacgtctattatcataaaaataacaaatcatggatggaatcggagtttcgggtgtattcctctgcgaacaactgtacatttgaatatgtgtctcagccgttcctgatggatttggagggtaagcaaggcaactttaagaatttgcgagagttcgtcttcaagaacatagatggatactttaaaatttatagcaagcacacaccgattaatatagtgcgagaccttcctcaaggtttctcggcccttgagccgctagtggacctgcccattggaattaatatcacccggtttcagactctgcttgcccttcatcgttcttatctgacccctggcgattcttcatcaggatggacggctggggctgccgcctattatgtcggataccttcaaccaaggacttttctcctcaagtataacgagaacggaacaattacagatgcagtcgattgcgccctagaccctctgtcggaaacgaagtgcaccttgaagagttttacagtagagaaggggatttaccagaccagtaacttcagggtccaaccgaccgaatccatcgtccgatttccaaatataactaatttatgtccgtttgacgaggtcttcaacgcaactcggttcgcgtcagtttatgcgtggaaccgcaaaagaataagcaactgcgtagctgactattccgttctctacaactctgcgccgttttttacttttaaatgctatggagtaagtccaacaaaattaaatgatctatgttttacaaatgtgtacgcagactcgtttgtaataaggggtgacgaagttcgtcagatagcaccagggcaaactgggaatattgcagactacaactataagctacccgatgacttcactggctgcgtcatcgcttggaatagtaataaattagatagtaaggtgagtgggaattataattacctatatcgtctctttagaaaaagtaacctcaagccattcgaacgcgacatttctacagaaatctatcaagctggcaataaaccttgcaacggtgtcgcgggcttcaactgctactttccccttaggtcgtactcttttcgacctacctatggtgtgggccaccagccctatagagttgttgtcctatcttttgaactattacatgccccagcgacggtatgcggacccaagaagtcgactaatttagtaaagaacaaatgcgttaattttaattttaatggccttaaagggacaggtgttttaacggaatcgaataaaaaattcttacctttccagcaatttggacgcgacatagctgatacgacggatgcagtcagagaccctcagacactggagatactggacataaccccgtgcagcttcgggggagtctccgtaataacccctgggacgaacacatccaatcaggtagcagtattatatcaaggcgtcaattgtacagaagttcctgtcgctatccatgcagatcaactcaccccgacctggcgcgtttatagcactgggagtaatgtattccaaactcgtgcaggatgtcttatcggggctgaatacgtgaataactcatacgagtgtgacattccaattggagctggcatatgtgccagctatcaaactcaaacgaagtcccaccaacaggcacagtctgtcgcgtctcaatcgatcattgcctatacaatgagtcttggtgccgaaaattcagttgcatatagcaacaactcaatagcgatacctactaatttcacaatcagtgtgaccaccgaaattctcccagtatcgatgacaaagacatccgtggattgtactatgtacatctgtggagactcgacggagtgctccaacttactccttcagtacgggtccttttgcactcaattaaagagggccctaacaggcattgctgttgagcaagacaagaacacgcaagaggtatttgcacaggtgaagcaaatatacaagacaccaccaattaagtactttggaggttttaacttctctcagatactcccagatcccagcaaaccctctaaacggagcttcatagaagacctcttgtttaataaagtgactttagctgatgcaggctttatcaagcaatatggggattgtttgggggatattgccgcccgcgacctcatctgcgcccagaaattcaagggtctaacagtattaccaccgctcctgacagacgagatgatcgctcaatacacttctgcgctgttggccgggacaattacgtctgggtggaccttcggcgcaggtgccgccttgcagatcccatttgcgatgcaaatggcgtatcgttttaacggtataggtgtcacacaaaacgtattatacgaaaaccagaaactaatagctaaccaatttaactcagcaataggaaaaatacaggattctctttcctctacggcgagcgccctcgggaaacttcaggatgtagtgaaccataacgctcaagcacttaataccctggttaagcaactatcaagcaagttcggtgctatctcatcagtgcttaatgacatcttcagtcgactagatcccccggaagcagaagttcaaatcgacagattgataactggccgcttgcaatctctacaaacatacgttacccagcagctgattcgggctgcggaaatccgagcatcggccaacctcgccgcgactaaaatgagcgagtgcgtattgggccagagtaaaagggttgacttctgcggtaagggctaccaccttatgagttttccgcagagtgcgcctcacggagttgtcttcctccacgtgacgtatgtgccggcacaggaaaaaaatttcaccaccgcccctgcgatatgtcatgatggtaaggcgcactttccaagagagggtgtctttgtttcaaatggaacccactggttcgttactcaacgtaatttttacgaacctcagattatcactacggataatacgttcgtgtcaggaaactgcgacgtggtaattggtatagtaaataatactgtgtatgatcccctccagccggagctggactcattcaaagaggaattagataagtacttcaaaaatcacacaagccctgatgtggacttgggagatatctcaggaattaacgcttccgttgtcaacatccaaaaagagatagacaggctgaatgaagtagcgaaaaacctgaacgaatccctgattgacttgcaagagctgggcaaatacgaacagtatattaaatggccctggtatatttggttggggttcatcgctggtttaatcgctattgttatggtcaccattatgctttgttgtatgacgtcctgttgttcttgtctaaagggctgctgttcgtgcggttcctgctgtaaattcgatgaggatgactccgaacccgttctgaaaggcgtcaagctccattatacttaatgaaagctt

SEQ ID NO: 166 - DNA, 3834 bp, synthetic construct
  misc_feature 1..3834: note = encodes recombinant coronavirus Spike (S) polypeptide
  source 1..3834: mol_type = other DNA
ggatccgccaccatgtttgtttttctcgtactacttccactagtatctagccaatgtgtaaatttaaccacgaggacgcagctgcctccggcatatacgaatagtttcactaggggagtctattatccagataaagtgttccgaagcagtgttctacattcaacacaggacctcttccttcctttctttagcaacgtcacgtggttccatgtcataagcggcacaaacggcacaaagcgcttcgataatccggtgcttccgtttaacgatggggtttattttgcttctattgaaaagagcaacattatacgcggttggatcttcggaactacattggatagtaaaacgcaatcattgctaatcgttaataacgcgactaatgtagtgattaaggtgtgcgagttccagttttgcaatgacccctttttggatcataaaaataataaatcgtggatggaatcagaatttcgtgtatattcaagcgcaaacaactgtacgttcgagtacgtgagtcagcccttcttgatggatctggaagggaagcagggcaattttaaaaacttacgtgagtttgtatttaagaatatcgacgggtatttcaagatttactcaaagcacacaccgattattgttcgagagccggaagatttaccccaaggcttctcagcactggaacccttggtagacctacctatcggtattaatataacccgcttccaaaccttgttagcgctgcatcggagttatttaacccccggagactcatcgagcgggtggaccgccggggctgcagcttattacgtggggtatttacaaccacggacgttcttactcaagtacaacgagaacgggacgattactgatgccgtcgactgtgctttggacccgctgagcgaaaccaagtgcacactcaagtctttcacggtagagaaggggatctaccagacatcaaattttcgggtacaaccaacggagtccatcgtacgctttccgaatatcacgaatctttgtccattcgatgaggtattcaatgctacgcgttttgcgagtgtgtacgcgtggaataggaagcgtatctcaaattgcgtcgctgattactccgtactctataacagcgcgcccttctttaccttcaaatgctacggggtttctcctactaaactaaacgatctatgttttacgaacgtctacgcagacagctttgttatacgaggggacgaggttcggcagatcgcccccggccaaacaggaaacatcgccgactataattacaaactcccagatgactttactggttgcgtaattgcgtggaactctaacaagttagactccaaggtctcgggaaactacaattacctgtaccgtctcttcagaaaatctaacttaaagcctttcgagcgagatattagcactgaaatctatcaggcgggtaataaaccctgtaacggggtcgccggttttaactgctactttcctcttcggtcgtattcctttcgcccgacctatggagttggacaccaaccttatagagtcgttgttctaagttttgaattgctccatgccccggcgacggtatgcgggccaaagaaaagtactaatctcgttaagaataaatgtgtgaatttcaactttaacggacttaaaggtacgggcgtattgaccgagtcaaataaaaagtttttacccttccagcaatttggtagggatatcgcggatactactgacgcagtgagagatccacaaacacttgaaatcctagacatcaccccttgtagttttgggggagtgtctgtaatcacccctggtacaaacacttctaaccaagtcgcggttctttatcagggtgttaattgtacagaagtgcctgtcgccattcatgcagaccagctgacgcccacttggcgcgtctactcgacgggatctaatgtctttcagactcgagctggatgcctcatcggggcagaatacgtgaacaactcctatgaatgcgatattcctatcggtgctggcatttgcgcatcttatcaaacacagaccaaaagtcatcagcaagcgcaatccgttgccagtcaatctataattgcgtatacaatgtccttgggcgcggaaaattcagtcgcgtatagcaacaattctatcgctattccaacgaattttactatatcggtcacaacagagatactaccagtgtcgatgactaagacttcggtagattgcacaatgtacatatgcggagacagcacagaatgctcgaacctacttcttcaatatggttctttttgcactcagctcaagagagctcttactggcatagcagtggagcaagataaaaatacccaggaagtgtttgctcaagtaaaacagatatataaaacccctccgatcaaatattttggaggttttaacttctcacaaatactaccggacccttccaaaccatcgaaacggtccttcatagaggacttgctctttaataaggtaactttggcggatgctggttttataaagcagtatggagattgtcttggtgacatagcggccagagacctcatctgtgcacagaaattcaaaggtctaacagtacttccgcccctgctaacggacgagatgatagctcaatacaccagtgcccttctggctggaacgataaccagtggatggaccttcggcgcaggtgccgcactgcagattccgttcgcaatgcagatggcctatcggtttaatgggatcggcgtcactcaaaatgtattgtacgaaaatcagaaactcattgccaaccaattcaattcagcgataggcaagatccaggacagtctctcttccaccgcctccgccttaggtaagctacaagatgttgttaatcataacgctcaagcattgaatacgctggtaaaacaattgagcagcaaattcggcgcaattagctcagttttgaacgacatattctcccgacttgacccccccgaagctgaagtccaaatagataggctgataaccgggaggctacagtcactccaaacctacgtgactcaacagctcataagagcagccgaaataagagcctctgctaatctcgccgcgactaagatgtcagagtgtgttttaggtcaaagtaaaagggttgatttctgtggtaagggataccaccttatgtcctttccacaatcggctccacacggtgtggtctttctgcacgttacttatgtcccggctcaggagaagaatttcaccacagccccggctatttgtcatgacggcaaggcgcacttccccagagaaggcgtattcgtcagtaacggcactcactggttcgttactcaacgtaacttctacgaacctcagattataacgacagacaacacatttgtatcagggaactgtgatgtggtgatcggtatagtgaacaacacagtgtacgacccattacagccggagttagattctttcaaggaagagctggataagtacttcaagaatcacacctcgccagatgttgaccttggtgatatttcaggtataaacgcctctgtcgtgaatatccagaaagagatcgaccgtctcaacgaagtagcgaaaaatctaaacgaatcgttaattgaccttcaggagctggggaagtatgagcagtacattaagtggccctggtacatttggctgggctttattgcaggactgatagcaatagtgatggtcaccattatgttgtgctgcatgacatcctgctgctcttgtttaaaagggtgttgtagttgtggatcgtgttgcaagttcgacgaggatgattccgaacctgttctgaaaggcgtaaaattacactacacataatgaaagctt

SEQ ID NO: 167 - protein, 1273 aa, synthetic construct
  REGION 1..1273: note = recombinant coronavirus Spike (S) polypeptide
MFVFLVLLPLVSSQCVNLTTRTQLPPAYTNSFTRGVYYPDKVFRSSVLHSTQDLFLPFFSNVTWFHVIHVSGTNGTKRFDNPVLPFNDGVYFASIEKSNIIRGWIFGTTLDSKTQSLLIVNNATNVVIKVCEFQFCNDPFLDVYYHKNNKSWMESEFRVYSSANNCTFEYVSQPFLMDLEGKQGNFKNLREFVFKNIDGYFKIYSKHTPINIVRDLPQGFSALEPLVDLPIGINITRFQTLLALHRSYLTPGDSSSGWTAGAAAYYVGYLQPRTFLLKYNENGTITDAVDCALDPLSETKCTLKSFTVEKGIYQTSNFRVQPTESIVRFPNITNLCPFDEVFNATRFASVYAWNRKRISNCVADYSVLYNSAPFFTFKCYGVSPTKLNDLCFTNVYADSFVIRGDEVRQIAPGQTGNIADYNYKLPDDFTGCVIAWNSNKLDSKVSGNYNYLYRLFRKSNLKPFERDISTEIYQAGNKPCNGVAGFNCYFPLRSYSFRPTYGVGHQPYRVVVLSFELLHAPATVCGPKKSTNLVKNKCVNFNFNGLKGTGVLTESNKKFLPFQQFGRDIADTTDAVRDPQTLEILDITPCSFGGVSVITPGTNTSNQVAVLYQGVNCTEVPVAIHADQLTPTWRVYSTGSNVFQTRAGCLIGAEYVNNSYECDIPIGAGICASYQTQTKSHQQAQSVASQSIIAYTMSLGAENSVAYSNNSIAIPTNFTISVTTEILPVSMTKTSVDCTMYICGDSTECSNLLLQYGSFCTQLKRALTGIAVEQDKNTQEVFAQVKQIYKTPPIKYFGGFNFSQILPDPSKPSKRSFIEDLLFNKVTLADAGFIKQYGDCLGDIAARDLICAQKFKGLTVLPPLLTDEMIAQYTSALLAGTITSGWTFGAGAALQIPFAMQMAYRFNGIGVTQNVLYENQKLIANQFNSAIGKIQDSLSSTASALGKLQDVVNHNAQALNTLVKQLSSKFGAISSVLNDIFSRLDPPEAEVQIDRLITGRLQSLQTYVTQQLIRAAEIRASANLAATKMSECVLGQSKRVDFCGKGYHLMSFPQSAPHGVVFLHVTYVPAQEKNFTTAPAICHDGKAHFPREGVFVSNGTHWFVTQRNFYEPQIITTDNTFVSGNCDVVIGIVNNTVYDPLQPELDSFKEELDKYFKNHTSPDVDLGDISGINASVVNIQKEIDRLNEVAKNLNESLIDLQELGKYEQYIKWPWYIWLGFIAGLIAIVMVTIMLCCMTSCCSCLKGCCSCGSCCKFDEDDSEPVLKGVKLHYT

SEQ ID NO: 168 - DNA, 3843 bp, synthetic construct
  misc_feature 1..3843: note = encodes recombinant coronavirus Spike (S) polypeptide
  source 1..3843: mol_type = other DNA
ggatccgccaccatgtttgtattcttagtattgctgcccctagtgagcagccagtgtgttaatctgacgacgcggacccaacttcctccagcctacacaaactcttttacgcgcggggtctattacccggacaaagtgttccgttcgagtgttttgcatagcacccaggatttattcctaccattcttttcaaatgttacctggttccatgtgattcacgtctccggtactaatggaactaaacggttcgacaaccccgttttgccgttcaacgatggggtgtacttcgcttctattgagaagtcgaatatcatacgtgggtggattttcggcacgaccttggatagtaaaactcagtcgttacttatagtaaataatgctaccaatgttgtgattaaggtgtgtgagttccagttttgtaatgatccctttcttgacgtctattatcataaaaataacaaatcatggatggaatcggagtttcgggtgtattcctctgcgaacaactgtacatttgaatatgtgtctcagccgttcctgatggatttggagggtaagcaaggcaactttaagaatttgcgagagttcgtcttcaagaacatagatggatactttaaaatttatagcaagcacacaccgattaatatagtgcgagaccttcctcaaggtttctcggcccttgagccgctagtggacctgcccattggaattaatatcacccggtttcagactctgcttgcccttcatcgttcttatctgacccctggcgattcttcatcaggatggacggctggggctgccgcctattatgtcggataccttcaaccaaggacttttctcctcaagtataacgagaacggaacaattacagatgcagtcgattgcgccctagaccctctgtcggaaacgaagtgcaccttgaagagttttacagtagagaaggggatttaccagaccagtaacttcagggtccaaccgaccgaatccatcgtccgatttccaaatataactaatttatgtccgtttgacgaggtcttcaacgcaactcggttcgcgtcagtttatgcgtggaaccgcaaaagaataagcaactgcgtagctgactattccgttctctacaactctgcgccgttttttacttttaaatgctatggagtaagtccaacaaaattaaatgatctatgttttacaaatgtgtacgcagactcgtttgtaataaggggtgacgaagttcgtcagatagcaccagggcaaactgggaatattgcagactacaactataagctacccgatgacttcactggctgcgtcatcgcttggaatagtaataaattagatagtaaggtgagtgggaattataattacctatatcgtctctttagaaaaagtaacctcaagccattcgaacgcgacatttctacagaaatctatcaagctggcaataaaccttgcaacggtgtcgcgggcttcaactgctactttccccttaggtcgtactcttttcgacctacctatggtgtgggccaccagccctatagagttgttgtcctatcttttgaactattacatgccccagcgacggtatgcggacccaagaagtcgactaatttagtaaagaacaaatgcgttaattttaattttaatggccttaaagggacaggtgttttaacggaatcgaataaaaaattcttacctttccagcaatttggacgcgacatagctgatacgacggatgcagtcagagaccctcagacactggagatactggacataaccccgtgcagcttcgggggagtctccgtaataacccctgggacgaacacatccaatcaggtagcagtattatatcaaggcgtcaattgtacagaagttcctgtcgctatccatgcagatcaactcaccccgacctggcgcgtttatagcactgggagtaatgtattccaaactcgtgcaggatgtcttatcggggctgaatacgtgaataactcatacgagtgtgacattccaattggagctggcatatgtgccagctatcaaactcaaacgaagtcccaccaacaggcacagtctgtcgcgtctcaatcgatcattgcctatacaatgagtcttggtgccgaaaattcagttgcatatagcaacaactcaatagcgatacctactaatttcacaatcagtgtgaccaccgaaattctcccagtatcgatgacaaagacatccgtggattgtactatgtacatctgtggagactcgacggagtgctccaacttactccttcagtacgggtccttttgcactcaattaaagagggccctaacaggcattgctgttgagcaagacaagaacacgcaagaggtatttgcacaggtgaagcaaatatacaagacaccaccaattaagtactttggaggttttaacttctctcagatactcccagatcccagcaaaccctctaaacggagcttcatagaagacctcttgtttaataaagtgactttagctgatgcaggctttatcaagcaatatggggattgtttgggggatattgccgcccgcgacctcatctgcgcccagaaattcaagggtctaacagtattaccaccgctcctgacagacgagatgatcgctcaatacacttctgcgctgttggccgggacaattacgtctgggtggaccttcggcgcaggtgccgccttgcagatcccatttgcgatgcaaatggcgtatcgttttaacggtataggtgtcacacaaaacgtattatacgaaaaccagaaactaatagctaaccaatttaactcagcaataggaaaaatacaggattctctttcctctacggcgagcgccctcgggaaacttcaggatgtagtgaaccataacgctcaagcacttaataccctggttaagcaactatcaagcaagttcggtgctatctcatcagtgcttaatgacatcttcagtcgactagatcccccggaagcagaagttcaaatcgacagattgataactggccgcttgcaatctctacaaacatacgttacccagcagctgattcgggctgcggaaatccgagcatcggccaacctcgccgcgactaaaatgagcgagtgcgtattgggccagagtaaaagggttgacttctgcggtaagggctaccaccttatgagttttccgcagagtgcgcctcacggagttgtcttcctccacgtgacgtatgtgccggcacaggaaaaaaatttcaccaccgcccctgcgatatgtcatgatggtaaggcgcactttccaagagagggtgtctttgtttcaaatggaacccactggttcgttactcaacgtaatttttacgaacctcagattatcactacggataatacgttcgtgtcaggaaactgcgacgtggtaattggtatagtaaataatactgtgtatgatcccctccagccggagctggactcattcaaagaggaattagataagtacttcaaaaatcacacaagccctgatgtggacttgggagatatctcaggaattaacgcttccgttgtcaacatccaaaaagagatagacaggctgaatgaagtagcgaaaaacctgaacgaatccctgattgacttgcaagagctgggcaaatacgaacagtatattaaatggccctggtatatttggttggggttcatcgctggtttaatcgctattgttatggtcaccattatgctttgttgtatgacgtcctgttgttcttgtctaaagggctgctgttcgtgcggttcctgctgtaaattcgatgaggatgactccgaacccgttctgaaaggcgtcaagctccattatacttaatgaaagtcc

SEQ ID NO: 169 - DNA, 3819 bp, synthetic construct; identical to SEQ ID NO: 161
  misc_feature 1..3819: note = encodes recombinant coronavirus Spike (S) polypeptide
  source 1..3819: mol_type = other DNA

SEQ ID NO: 170 - protein, 1270 aa, synthetic construct
  REGION 1..1270: note = recombinant coronavirus Spike (S) polypeptide
MFVFLVLLPLVSSQCVNLTTRTQLPPAYTNSFTRGVYYPDKVFRSSVLHSTQDLFLPFFSNVTWFHVISGTNGTKRFDNPVLPFNDGVYFASIEKSNIIRGWIFGTTLDSKTQSLLIVNNATNVVIKVCEFQFCNDPFLDHKNNKSWMESEFRVYSSANNCTFEYVSQPFLMDLEGKQGNFKNLREFVFKNIDGYFKIYSKHTPIIVREPEDLPQGFSALEPLVDLPIGINITRFQTLLALHRSYLTPGDSSSGWTAGAAAYYVGYLQPRTFLLKYNENGTITDAVDCALDPLSETKCTLKSFTVEKGIYQTSNFRVQPTESIVRFPNITNLCPFDEVFNATRFASVYAWNRKRISNCVADYSVLYNSAPFFTFKCYGVSPTKLNDLCFTNVYADSFVIRGDEVRQIAPGQTGNIADYNYKLPDDFTGCVIAWNSNKLDSKVSGNYNYLYRLFRKSNLKPFERDISTEIYQAGNKPCNGVAGFNCYFPLRSYSFRPTYGVGHQPYRVVVLSFELLHAPATVCGPKKSTNLVKNKCVNFNFNGLKGTGVLTESNKKFLPFQQFGRDIADTTDAVRDPQTLEILDITPCSFGGVSVITPGTNTSNQVAVLYQGVNCTEVPVAIHADQLTPTWRVYSTGSNVFQTRAGCLIGAEYVNNSYECDIPIGAGICASYQTQTKSHQQAQSVASQSIIAYTMSLGAENSVAYSNNSIAIPTNFTISVTTEILPVSMTKTSVDCTMYICGDSTECSNLLLQYGSFCTQLKRALTGIAVEQDKNTQEVFAQVKQIYKTPPIKYFGGFNFSQILPDPSKPSKRSFIEDLLFNKVTLADAGFIKQYGDCLGDIAARDLICAQKFKGLTVLPPLLTDEMIAQYTSALLAGTITSGWTFGAGAALQIPFAMQMAYRFNGIGVTQNVLYENQKLIANQFNSAIGKIQDSLSSTASALGKLQDVVNHNAQALNTLVKQLSSKFGAISSVLNDIFSRLDPPEAEVQIDRLITGRLQSLQTYVTQQLIRAAEIRASANLAATKMSECVLGQSKRVDFCGKGYHLMSFPQSAPHGVVFLHVTYVPAQEKNFTTAPAICHDGKAHFPREGVFVSNGTHWFVTQRNFYEPQIITTDNTFVSGNCDVVIGIVNNTVYDPLQPELDSFKEELDKYFKNHTSPDVDLGDISGINASVVNIQKEIDRLNEVAKNLNESLIDLQELGKYEQYIKWPWYIWLGFIAGLIAIVMVTIMLCCMTSCCSCLKGCCSCGSCCKFDEDDSEPVLKGVKLHYT

SEQ ID NO: 171 - DNA, 3834 bp, synthetic construct
  misc_feature 1..3834: note = encodes recombinant coronavirus Spike (S) polypeptide
  source 1..3834: mol_type = other DNA
ggatccgccaccatgtttgtttttctcgtactacttccactagtatctagccaatgtgtaaatttaaccacgaggacgcagctgcctccggcatatacgaatagtttcactaggggagtctattatccagataaagtgttccgaagcagtgttctacattcaacacaggacctcttccttcctttctttagcaacgtcacgtggttccatgtcataagcggcacaaacggcacaaagcgcttcgataatccggtgcttccgtttaacgatggggtttattttgcttctattgaaaagagcaacattatacgcggttggatcttcggaactacattggatagtaaaacgcaatcattgctaatcgttaataacgcgactaatgtagtgattaaggtgtgcgagttccagttttgcaatgacccctttttggatcataaaaataataaatcgtggatggaatcagaatttcgtgtatattcaagcgcaaacaactgtacgttcgagtacgtgagtcagcccttcttgatggatctggaagggaagcagggcaattttaaaaacttacgtgagtttgtatttaagaatatcgacgggtatttcaagatttactcaaagcacacaccgattattgttcgagagccggaagatttaccccaaggcttctcagcactggaacccttggtagacctacctatcggtattaatataacccgcttccaaaccttgttagcgctgcatcggagttatttaacccccggagactcatcgagcgggtggaccgccggggctgcagcttattacgtggggtatttacaaccacggacgttcttactcaagtacaacgagaacgggacgattactgatgccgtcgactgtgctttggacccgctgagcgaaaccaagtgcacactcaagtctttcacggtagagaaggggatctaccagacatcaaattttcgggtacaaccaacggagtccatcgtacgctttccgaatatcacgaatctttgtccattcgatgaggtattcaatgctacgcgttttgcgagtgtgtacgcgtggaataggaagcgtatctcaaattgcgtcgctgattactccgtactctataacagcgcgcccttctttaccttcaaatgctacggggtttctcctactaaactaaacgatctatgttttacgaacgtctacgcagacagctttgttatacgaggggacgaggttcggcagatcgcccccggccaaacaggaaacatcgccgactataattacaaactcccagatgactttactggttgcgtaattgcgtggaactctaacaagttagactccaaggtctcgggaaactacaattacctgtaccgtctcttcagaaaatctaacttaaagcctttcgagcgagatattagcactgaaatctatcaggcgggtaataaaccctgtaacggggtcgccggttttaactgctactttcctcttcggtcgtattcctttcgcccgacctatggagttggacaccaaccttatagagtcgttgttctaagttttgaattgctccatgccccggcgacggtatgcgggccaaagaaaagtactaatctcgttaagaataaatgtgtgaatttcaactttaacggacttaaaggtacgggcgtattgaccgagtcaaataaaaagtttttacccttccagcaatttggtagggatatcgcggatactactgacgcagtgagagatccacaaacacttgaaatcctagacatcaccccttgtagttttgggggagtgtctgtaatcacccctggtacaaacacttctaaccaagtcgcggttctttatcagggtgttaattgtacagaagtgcctgtcgccattcatgcagaccagctgacgcccacttggcgcgtctactcgacgggatctaatgtctttcagactcgagctggatgcctcatcggggcagaatacgtgaacaactcctatgaatgcgatattcctatcggtgctggcatttgcgcatcttatcaaacacagaccaaaagtcatcagcaagcgcaatccgttgccagtcaatctataattgcgtatacaatgtccttgggcgcggaaaattcagtcgcgtatagcaacaattctatcgctattccaacgaattttactatatcggtcacaacagagatactaccagtgtcgatgactaagacttcggtagattgcacaatgtacatatgcggagacagcacagaatgctcgaacctacttcttcaatatggttctttttgcactcagctcaagagagctcttactggcatagcagtggagcaagataaaaatacccaggaagtgtttgctcaagtaaaacagatatataaaacccctccgatcaaatattttggaggttttaacttctcacaaatactaccggacccttccaaaccatcgaaacggtccttcatagaggacttgctctttaataaggtaactttggcggatgctggttttataaagcagtatggagattgtcttggtgacatagcggccagagacctcatctgtgcacagaaattcaaaggtctaacagtacttccgcccctgctaacggacgagatgatagctcaatacaccagtgcccttctggctggaacgataaccagtggatggaccttcggcgcaggtgccgcactgcagattccgttcgcaatgcagatggcctatcggtttaatgggatcggcgtcactcaaaatgtattgtacgaaaatcagaaactcattgccaaccaattcaattcagcgataggcaagatccaggacagtctctcttccaccgcctccgccttaggtaagctacaagatgttgttaatcataacgctcaagcattgaatacgctggtaaaacaattgagcagcaaattcggcgcaattagctcagttttgaacgacatattctcccgacttgacccccccgaagctgaagtccaaatagataggctgataaccgggaggctacagtcactccaaacctacgtgactcaacagctcataagagcagccgaaataagagcctctgctaatctcgccgcgactaagatgtcagagtgtgttttaggtcaaagtaaaagggttgatttctgtggtaagggataccaccttatgtcctttccacaatcggctccacacggtgtggtctttctgcacgttacttatgtcccggctcaggagaagaatttcaccacagccccggctatttgtcatgacggcaaggcgcacttccccagagaaggcgtattcgtcagtaacggcactcactggttcgttactcaacgtaacttctacgaacctcagattataacgacagacaacacatttgtatcagggaactgtgatgtggtgatcggtatagtgaacaacacagtgtacgacccattacagccggagttagattctttcaaggaagagctggataagtacttcaagaatcacacctcgccagatgttgaccttggtgatatttcaggtataaacgcctctgtcgtgaatatccagaaagagatcgaccgtctcaacgaagtagcgaaaaatctaaacgaatcgttaattgaccttcaggagctggggaagtatgagcagtacattaagtggccctggtacatttggctgggctttattgcaggactgatagcaatagtgatggtcaccattatgttgtgctgcatgacatcctgctgctcttgtttaaaagggtgttgtagttgtggatcgtgttgcaagttcgacgaggatgattccgaacctgttctgaaaggcgtaaaattacactacacataatgaaagtcc

SEQ ID NO: 172 - DNA, 3810 bp, synthetic construct; identical to SEQ ID NO: 162
  misc_feature 1..3810: note = encodes recombinant coronavirus Spike (S) polypeptide
  source 1..3810: mol_type = other DNA

SEQ ID NO: 173 - protein, 1271 aa, synthetic construct
  REGION 1..1271: note = recombinant coronavirus Spike (S) polypeptide
MFVFLVLLPLVSSQCVNLRTRTQLPPAYTNSFTRGVYYPDKVFRSSVLHSTQDLFLPFFSNVTWFHAIHVSGTNGTKRFDNPVLPFNDGVYFASTEKSNIIRGWIFGTTLDSKTQSLLIVNNATNVVIKVCEFQFCNDPFLDVYYHKNNKSWMESGVYSSANNCTFEYVSQPFLMDLEGKQGNFKNLREFVFKNIDGYFKIYSKHTPINLVRDLPQGFSALEPLVDLPIGINITRFQTLLALHRSYLTPGDSSSGWTAGAAAYYVGYLQPRTFLLKYNENGTITDAVDCALDPLSETKCTLKSFTVEKGIYQTSNFRVQPTESIVRFPNITNLCPFGEVFNATRFASVYAWNRKRISNCVADYSVLYNSASFSTFKCYGVSPTKLNDLCFTNVYADSFVIRGDEVRQIAPGQTGKIADYNYKLPDDFTGCVIAWNSNNLDSKVGGNYNYRYRLFRKSNLKPFERDISTEIYQAGSKPCNGVEGFNCYFPLQSYGFQPTNGVGYQPYRVVVLSFELLHAPATVCGPKKSTNLVKNKCVNFNFNGLTGTGVLTESNKKFLPFQQFGRDIADTTDAVRDPQTLEILDITPCSFGGVSVITPGTNTSNQVAVLYQGVNCTEVPVAIHADQLTPTWRVYSTGSNVFQTRAGCLIGAEHVNNSYECDIPIGAGICASYQTQTNSRQQAQSVASQSIIAYTMSLGAENSVAYSNNSIAIPTNFTISVTTEILPVSMTKTSVDCTMYICGDSTECSNLLLQYGSFCTQLNRALTGIAVEQDKNTQEVFAQVKQIYKTPPIKDFGGFNFSQILPDPSKPSKRSFIEDLLFNKVTLADAGFIKQYGDCLGDIAARDLICAQKFNGLTVLPPLLTDEMIAQYTSALLAGTITSGWTFGAGAALQIPFAMQMAYRFNGIGVTQNVLYENQKLIANQFNSAIGKIQDSLSSTASALGKLQNVVNQNAQALNTLVKQLSSNFGAISSVLNDILSRLDPPEAEVQIDRLITGRLQSLQTYVTQQLIRAAEIRASANLAATKMSECVLGQSKRVDFCGKGYHLMSFPQSAPHGVVFLHVTYVPAQEKNFTTAPAICHDGKAHFPREGVFVSNGTHWFVTQRNFYEPQIITTDNTFVSGNCDVVIGIVNNTVYDPLQPELDSFKEELDKYFKNHTSPDVDLGDISGINASVVNIQKEIDRLNEVAKNLNESLIDLQELGKYEQYIKWPWYIWLGFIAGLIAIVMVTIMLCCMTSCCSCLKGCCSCGSCCKFDEDDSEPVLKGVKLHYT

SEQ ID NO: 174 - protein, 1258 aa, synthetic construct
  REGION 1..1258: note = recombinant coronavirus Spike (S) polypeptide
QCVNLTTRTQLPPAYTNSFTRGVYYPDKVFRSSVLHSTQDLFLPFFSNVTWFHVIHVSGTNGTKRFDNPVLPFNDGVYFASIEKSNIIRGWIFGTTLDSKTQSLLIVNNATNVVIKVCEFQFCNDPFLDVYYHKNNKSWMESEFRVYSSANNCTFEYVSQPFLMDLEGKQGNFKNLREFVFKNIDGYFKIYSKHTPINIVRDLPQGFSALEPLVDLPIGINITRFQTLLALHRSYLPGDSSSGWTAGAAAYYVGYLQPRTFLLKYNENGTITDAVDCALDPLSETKCTLKSFTVEKGIYQTSNFRVQPTESIVRFPNITNLCPFDEVFNATRFASVYAWNRKRISNCVADYSVLYNLAPFFTFKCYGVSPTKLNDLCFTNVYADSFVIRGDEVRQIAPGQTGNIADYNYKLPDDFTGCVIAWNSNKLDSKVSGNYNYLYRLFRKSNLKPFERDISTEIYQAGNKPCNGVAGFNCYFPLRSYSFRPTYGVGHQPYRVVVLSFELLHAPATVCGPKKSTNLVKNKCVNFNFNGLKGTGVLTESNKKFLPFQQFGRDIADTTDAVRDPQTLEILDITPCSFGGVSVITPGTNTSNQVAVLYQGVNCTEVPVAIHADQLTPTWRVYSTGSNVFQTRAGCLIGAEYVNNSYECDIPIGAGICASYQTQTKSHQQAQSVASQSIIAYTMSLGAENSVAYSNNSIAIPTNFTISVTTEILPVSMTKTSVDCTMYICGDSTECSNLLLQYGSFCTQLKRALTGIAVEQDKNTQEVFAQVKQIYKTPPIKYFGGFNFSQILPDPSKPSKRSFIEDLLFNKVTLADAGFIKQYGDCLGDIAARDLICAQKFKGLTVLPPLLTDEMIAQYTSALLAGTITSGWTFGAGAALQIPFAMQMAYRFNGIGVTQNVLYENQKLIANQFNSAIGKIQDSLSSTASALGKLQDVVNHNAQALNTLVKQLSSKFGAISSVLNDIFSRLDPPEAEVQIDRLITGRLQSLQTYVTQQLIRAAEIRASANLAATKMSECVLGQSKRVDFCGKGYHLMSFPQSAPHGVVFLHVTYVPAQEKNFTTAPAICHDGKAHFPREGVFVSNGTHWFVTQRNFYEPQIITTDNTFVSGNCDVVIGIVNNTVYDPLQPELDSFKELDKYFKNHTSPDVDLGDISGINASVVNIQKEIDRLNEVAKNLNESLIDLQELGKYEQYIKWPWYIWLGFIAGLIAIVMVTIMLCCMTSCCSCLKGCCSCGSCCKFDEDDSEPVLKGVKLHYT

SEQ ID NO: 175 - protein, 1257 aa, synthetic construct
  REGION 1..1257: note = recombinant coronavirus Spike (S) polypeptide
QCVNLTTRTQLPPAYTNSFTRGVYYPDKVFRSSVLHSTQDLFLPFFSNVTWFHVISGTNGTKRFDNPVLPFNDGVYFASIEKSNIIRGWIFGTTLDSKTQSLLIVNNATNVVIKVCEFQFCNDPFLDHKNNKSWMESEFRVYSSANNCTFEYVSQPFLMDLEGKQGNFKNLREFVFKNIDGYFKIYSKHTPIIVREPEDLPQGFSALEPLVDLPIGINITRFQTLLALHRSYLTPGDSSSGWTAGAAAYYVGYLQPRTFLLKYNENGTITDAVDCALDPLSETKCTLKSFTVEKGIYQTSNFRVQPTESIVRFPNITNLCPFDEVFNATRFASVYAWNRKRISNCVADYSVLYNLAPFFTFKCYGVSPTKLNDLCFTNVYADSFVIRGDEVRQIAPGQTGNIADYNYKLPDDFTGCVIAWNSNKLDSKVSGNYNYLYRLFRKSNLKPFERDISTEIYQAGNKPCNGVAGFNCYFPLRSYSFRPTYGVGHQPYRVVVLSFELLHAPATVCGPKKSTNLVKNKCVNFNFNGLKGTGVLTESNKKFLPFQQFGRDIADTTDAVRDPQTLEILDITPCSFGGVSVITPGTNTSNQVAVLYQGVNCTEVPVAIHADQLTPTWRVYSTGSNVFQTRAGCLIGAEYVNNSYECDIPIGAGICASYQTQTKSHQQAQSVASQSIIAYTMSLGAENSVAYSNNSIAIPTNFTISVTTEILPVSMTKTSVDCTMYICGDSTECSNLLLQYGSFCTQLKRALTGIAVEQDKNTQEVFAQVKQIYKTPPIKYFGGFNFSQILPDPSKPSKRSFIEDLLFNKVTLADAGFIKQYGDCLGDIAARDLICAQKFKGLTVLPPLLTDEMIAQYTSALLAGTITSGWTFGAGAALQIPFAMQMAYRFNGIGVTQNVLYENQKLIANQFNSAIGKIQDSLSSTASALGKLQDVVNHNAQALNTLVKQLSSKFGAISSVLNDIFSRLDPPEAEVQIDRLITGRLQSLQTYVTQQLIRAAEIRASANLAATKMSECVLGQSKRVDFCGKGYHLMSFPQSAPHGVVFLHVTYVPAQEKNFTTAPAICHDGKAHFPREGVFVSNGTHWFVTQRNFYEPQIITTDNTFVSGNCDVVIGIVNNTVYDPLQPELDSFKEELDKYFKNHTSPDVDLGDISGINASVVNIQKEIDRLNEVAKNLNESLIDLQELGKYEQYIKWPWYIWLGFIAGLIAIVMVTIMLCCMTSCCSCLKGCCSCGSCCKFDEDDSEPVLKGVKLHYT

SEQ ID NO: 176 - protein, 1258 aa, synthetic construct
  REGION 1..1258: note = recombinant coronavirus Spike (S) polypeptide
QCVNLRTRTQLPPAYTNSFTRGVYYPDKVFRSSVLHSTQDLFLPFFSNVTWFHAIHVSGTNGTKRFDNPVLPFNDGVYFASTEKSNIIRGWIFGTTLDSKTQSLLIVNNATNVVIKVCEFQFCNDPFLDVYYHKNNKSWMESGVYSSANNCTFEYVSQPFLMDLEGKQGNFKNLREFVFKNIDGYFKIYSKHTPINLVRDLPQGFSALEPLVDLPIGINITRFQTLLALHRSYLTPGDSSSGWTAGAAAYYVGYLQPRTFLLKYNENGTITDAVDCALDPLSETKCTLKSFTVEKGIYQTSNFRVQPTESIVRFPNITNLCPFGEVFNATRFASVYAWNRKRISNCVADYSVLYNSASFSTFKCYGVSPTKLNDLCFTNVYADSFVIRGDEVRQIAPGQTGKIADYNYKLPDDFTGCVIAWNSNNLDSKVGGNYNYRYRLFRKSNLKPFERDISTEIYQAGSKPCNGVEGFNCYFPLQSYGFQPTNGVGYQPYRVVVLSFELLHAPATVCGPKKSTNLVKNKCVNFNFNGLTGTGVLTESNKKFLPFQQFGRDIADTTDAVRDPQTLEILDITPCSFGGVSVITPGTNTSNQVAVLYQGVNCTEVPVAIHADQLTPTWRVYSTGSNVFQTRAGCLIGAEHVNNSYECDIPIGAGICASYQTQTNSRQQAQSVASQSIIAYTMSLGAENSVAYSNNSIAIPTNFTISVTTEILPVSMTKTSVDCTMYICGDSTECSNLLLQYGSFCTQLNRALTGIAVEQDKNTQEVFAQVKQIYKTPPIKDFGGFNFSQILPDPSKPSKRSFIEDLLFNKVTLADAGFIKQYGDCLGDIAARDLICAQKFNGLTVLPPLLTDEMIAQYTSALLAGTITSGWTFGAGAALQIPFAMQMAYRFNGIGVTQNVLYENQKLIANQFNSAIGKIQDSLSSTASALGKLQNVVNQNAQALNTLVKQLSSNFGAISSVLNDILSRLDPPEAEVQIDRLITGRLQSLQTYVTQQLIRAAEIRASANLAATKMSECVLGQSKRVDFCGKGYHLMSFPQSAPHGVVFLHVTYVPAQEKNFTTAPAICHDGKAHFPREGVFVSNGTHWFVTQRNFYEPQIITTDNTFVSGNCDVVIGIVNNTVYDPLQPELDSFKEELDKYFKNHTSPDVDLGDISGINASVVNIQKEIDRLNEVAKNLNESLIDLQELGKYEQYIKWPWYIWLGFIAGLIAIVMVTIMLCCMTSCCSCLKGCCSCGSCCKFDEDDSEPVLKGVKLHYT

SEQ ID NO: 177 - protein, 1273 aa, synthetic construct
  REGION 1..1273: note = Recombinant SARS-CoV-2 S Polypeptide
MFVFLVLLPLVSSQCVNLTTRTQLPPAYTNSFTRGVYYPDKVFRSSVLHSTQDLFLPFFSNVTWFHAIHVSGTNGTKRFDNPVLPFNDGVYFASIEKSNIIRGWIFGTTLDSKTQSLLIVNNATNVVIKVCEFQFCNDPFLDVYYHKNNKSWMKSEFRVYSSANNCTFEYVSQPFLMDLEGKQGNFKNLREFVFKNIDGYFKIYSKHTPINLVRDLPQGFSALEPLVDLPIGINITRFQTLLALHRSYLTPGDSSSGWTAGAAAYYVGYLQPRTFLLKYNENGTITDAVDCALDPLSETKCTLKSFTVEKGIYQTSNFRVQPTESIVRFPNITNLCPFGEVFNATRFASVYAWNRKRISNCVADYSVLYNSASFSTFKCYGVSPTKLNDLCFTNVYADSFVIRGDEVRQIAPGQTGKIADYNYKLPDDFTGCVIAWNSNNLDSKVGGNYNYRYRLFRKSNLKPFERDISTEIYQAGSTPCNGVQGFNCYFPLQSYGFQPTNGVGYQPYRVVVLSFELLHAPATVCGPKKSTNLVKNKCVNFNFNGLTGTGVLTESNKKFLPFQQFGRDIADTTDAVRDPQTLEILDITPCSFGGVSVITPGTNTSNQVAVLYQGVNCTEVPVAIHADQLTPTWRVYSTGSNVFQTRAGCLIGAEHVNNSYECDIPIGAGICASYQTQTNSRQQAQSVASQSIIAYTMSLGAENSVAYSNNSIAIPTNFTISVTTEILPVSMTKTSVDCTMYICGDSTECSNLLLQYGSFCTQLNRALTGIAVEQDKNTQEVFAQVKQIYKTPPIKDFGGFNFSQILPDPSKPSKRSFIEDLLFNKVTLADAGFIKQYGDCLGDIAARDLICAQKFNGLTVLPPLLTDEMIAQYTSALLAGTITSGWTFGAGAALQIPFAMQMAYRFNGIGVTQNVLYENQKLIANQFNSAIGKIQDSLSSTASALGKLQDVVNQNAQALNTLVKQLSSNFGAISSVLNDILSRLDPPEAEVQIDRLITGRLQSLQTYVTQQLIRAAEIRASANLAATKMSECVLGQSKRVDFCGKGYHLMSFPQSAPHGVVFLHVTYVPAHEKNFTTAPAICHDGKAHFPREGVFVSNGTHWFVTQRNFYEPQIITTDNTFVSGNCDVVIGIVNNTVYDPLQPELDSFKEELDKYFKNHTSPDVDLGDISGINASVVNIQKEIDRLNEVAKNLNESLIDLQELGKYEQYIKWPWYIWLGFIAGLIAIVMVTIMLCCMTSCCSCLKGCCSCGSCCKFDEDDSEPVLKGVKLHYT

SEQ ID NO: 178 - protein, 1271 aa, synthetic construct
  REGION 1..1271: note = Recombinant SARS-CoV-2 S Polypeptide
MFVFLVLLPLVSSQCVNLRTRTQLPPAYTNSFTRGVYYPDKVFRSSVLHSTQDLFLPFFSNVTWFHAIHVSGTNGTKRFDNPVLPFNDGVYFASTEKSNIIRGWIFGTTLDSKTQSLLIVNNATNVVIKVCEFQFCNDPFLDVYYHKNNKSWMESGVYSSANNCTFEYVSQPFLMDLEGKQGNFKNLREFVFKNIDGYFKIYSKHTPINLVRDLPQGFSALEPLVDLPIGINITRFQTLLALHRSYLTPGDSSSGITAGAAAYYVGYLQPRTFLLKYNENGTITDAVDCALDPLSETKCTLKSFTVEKGIYQTSNFRVQPTESIVRFPNITNLCPFGEVFNATRFASVYAWNRKRISNCVADYSVLYNSASFSTFKCYGVSPTKLNDLCFTNVYADSFVIRGDEVRQIAPGQTGNIADYNYKLPDDFTGCVIAWNSNNLDSKVGGNYNYRYRLFRKSNLKPFERDISTEIYQAGSKPCNGVEGFNCYFPLQSYGFQPTNGVGYQPYRVVVLSFELLHAPATVCGPKKSTNLVKNKCVNFNFNGLTGTGVLTESNKKFLPFQQFGRDIADTTDAVRDPQTLEILDITPCSFGGVSVITPGTNTSNQVAVLYQGVNCTEVPVAIHADQLTPTWRVYSTGSNVFQTRAGCLIGAEHVNNSYECDIPIGAGICASYQTQTNSRQQAQSVASQSIIAYTMSLGAENSVAYSNNSIAIPTNFTISVTTEILPVSMTKTSVDCTMYICGDSTECSNLLLQYGSFCTQLNRALTGIAVEQDKNTQEVFAQVKQIYKTPPIKDFGGFNFSQILPDPSKPSKRSFIEDLLFNKVTLADAGFIKQYGDCLGDIAARDLICAQKFNGLTVLPPLLTDEMIAQYTSALLAGTITSGWTFGAGAALQIPFAMQMAYRFNGIGVTQNVLYENQKLIANQFNSAIGKIQDSLSSTASALGKLQNVVNQNAQALNTLVKQLSSNFGAISSVLNDILSRLDPPEAEVQIDRLITGRLQSLQTYVTQQLIRAAEIRASANLAATKMSECVLGQSKRVDFCGKGYHLMSFPQSAPHGVVFLHVTYVPAQEKNFTTAPAICHDGKAHFPREGVFVSNGTHWFVTQRNFYEPQIITTDNTFVSGNCDVVIGIVNNTVYDPLQPELDSFKEELDKYFKNHTSPDVDLGDISGINASVVNIQKEIDRLNEVAKNLNESLIDLQELGKYEQYIKWPWYIWLGFIAGLIAIVMVTIMLCCMTSCCSCLKGCCSCGSCCKFDEDDSEPVLKGVKLHYT

SEQ ID NO: 179 - protein, 1273 aa, synthetic construct
  REGION 1..1273: note = Recombinant SARS-CoV-2 S Polypeptide
MFVFLVLLPLVSSQCVNLTTRTQLPPAYTNSFTRGVYYPDKVFRSSVLHSTQDLFLPFFSNVTWFHAIHVSGTNGTKRFDNPVLPFNDGVYFASIEKSNIIRGWIFGTTLDSKTQSLLIVNNATNVVIKVCEFQFCNDPFLGVSNHKNNKSWMESEFRVYSSANNCTFEYVSQPFLMDLEGKQGNFKNLREFVFKNIDGYFKIYSKHTPINLVRDLPQGFSALEPLVDLPIGINITRFQTLLALHRSYLTPGDSSSGWTAGAAAYYVGYLQPRTFLLKYNENGTITDAVDCALDPLSETKCTLKSFTVEKGIYQTSNFRVQPTESIVRFPNITNLCPFGEVFNATKFASVYAWNRKRISNCVADYSVLYNSASFSTFKCYGVSPTKLNDLCFTNVYADSFVIRGDEVRQIAPGQTGKIADYNYKLPDDFTGCVIAWNSNNLDSKVGGNYNYLYRLFRKSNLKPFERDISTEIYQAGSTPCNGVKGFNCYFPLQSYGFQPTYGVGYQPYRVVVLSFELLHAPATVCGPKKSTNLVKNKCVNFNFNGLTGTGVLTESNKKFLPFQQFGRDIADTTDAVRDPQTLEILDITPCSFGGVSVITPGTNTSNQVAVLYQGVNCTEVPVAIHADQLTPTWRVYSTGSNVFQTRAGCLIGAEHVNNSYECDIPIGAGICASYQTQTNSHQQAQSVASQSIIAYTMSLGAENSVAYSNNSIAIPTNFTISVTTEILPVSMTKTSVDCTMYICGDSTECSNLLLQYGSFCTQLNRALTGIAVEQDKNTQEVFAQVKQIYKTPPIKDFGGFNFSQILPDPSKPSKRSFIEDLLFNKVTLADAGFIKQYGDCLGDIAARDLICAQKFNGLTVLPPLLTDEMIAQYTSALLAGTITSGWTFGAGAALQIPFAMQMAYRFNGIGVTQNVLYENQKLIANQFNSAIGKIQDSLSSTASALGKLQNVVNQNAQALNTLVKQLSSNFGAISSVLNDILSRLDPPEAEVQIDRLITGRLQSLQTYVTQQLIRAAEIRASANLAATKMSECVLGQSKRVDFCGKGYHLMSFPQSAPHGVVFLHVTYVPAQEKNFTTAPAICHDGKAHFPREGVFVSNGTHWFVTQRNFYEPQIITTDNTFVSGNCDVVIGIVNNTVYDPLQPELDSFKEELDKYFKNHTSPDVDLGDISGINASVVNIQKEIDRLNEVAKNLNESLIDLQELGKYEQYIKWPWYIWLGFIAGLIAIVMVTIMLCCMTSCCSCLKGCCSCGSCCKFDEDDSEPVLKGVKLHYT

SEQ ID NO: 180 - protein, 1274 aa, synthetic construct
  REGION 1..1274: note = Recombinant SARS-CoV-2 S Polypeptide
MFVFLVLLPLVSSQCVNLTTRTQLPPAYTNSFTRGVYYPDKVFRSSVLHSTQDLFLPFFSNVTWFHAIHVSGTNGTKRFDNPVLPFNDGVYFASIEKSNIIRGWIFGTTLDSKTQSLLIVNNATNVVIKVCEFQFCNDPFLGVTSNHKNNKSWMESEFRVYSSANNCTFEYVSQPFLMDLEGKQGNFKNLREFVFKNIDGYFKIYSKHTPINLVRDLPQGFSALEPLVDLPIGINITRFQTLLALHRSYLTPGDSSSGWTAGAAAYYVGYLQPRTFLLKYNENGTITDAVDCALDPLSETKCTLKSFTVEKGIYQTSNFRVQPTESIVRFPNITNLCPFGEVFNATKFASVYAWNRKRISNCVADYSVLYNSASFSTFKCYGVSPTKLNDLCFTNVYADSFVIRGDEVRQIAPGQTGKIADYNYKLPDDFTGCVIAWNSNNLDSKVGGNYNYLYRLFRKSNLKPFERDISTEIYQAGSTPCNGVKGFNCYFPLQSYGFQPTYGVGYQPYRVVVLSFELLHAPATVCGPKKSTNLVKNKCVNFNFNGLTGTGVLTESNKKFLPFQQFGRDIADTTDAVRDPQTLEILDITPCSFGGVSVITPGTNTSNQVAVLYQGVNCTEVPVAIHADQLTPTWRVYSTGSNVFQTRAGCLIGAEHVNNSYECDIPIGAGICASYQTQTNSHQQAQSVASQSIIAYTMSLGAENSVAYSNNSIAIPTNFTISVTTEILPVSMTKTSVDCTMYICGDSTECSNLLLQYGSFCTQLNRALTGIAVEQDKNTQEVFAQVKQIYKTPPIKDFGGFNFSQILPDPSKPSKRSFIEDLLFNKVTLADAGFIKQYGDCLGDIAARDLICAQKFNGLTVLPPLLTDEMIAQYTSALLAGTITSGWTFGAGAALQIPFAMQMAYRFNGIGVTQNVLYENQKLIANQFNSAIGKIQDSLSSTASALGKLQNVVNQNAQALNTLVKQLSSNFGAISSVLNDILSRLDPPEAEVQIDRLITGRLQSLQTYVTQQLIRAAEIRASANLAATKMSECVLGQSKRVDFCGKGYHLMSFPQSAPHGVVFLHVTYVPAQEKNFTTAPAICHDGKAHFPREGVFVSNGTHWFVTQRNFYEPQIITTDNTFVSGNCDVVIGIVNNTVYDPLQPELDSFKEELDKYFKNHTSPDVDLGDISGINASVVNIQKEIDRLNEVAKNLNESLIDLQELGKYEQYIKWPWYIWLGFIAGLIAIVMVTIMLCCMTSCCSCLKGCCSCGSCCKFDEDDSEPVLKGVKLHYT

SEQ ID NO: 181 - protein, 1260 aa, synthetic construct
  REGION 1..1260: note = Recombinant SARS-CoV-2 S Polypeptide
QCVNLTTRTQLPPAYTNSFTRGVYYPDKVFRSSVLHSTQDLFLPFFSNVTWFHAIHVSGTNGTKRFDNPVLPFNDGVYFASIEKSNIIRGWIFGTTLDSKTQSLLIVNNATNVVIKVCEFQFCNDPFLDVYYHKNNKSWMKSEFRVYSSANNCTFEYVSQPFLMDLEGKQGNFKNLREFVFKNIDGYFKIYSKHTPINLVRDLPQGFSALEPLVDLPIGINITRFQTLLALHRSYLTPGDSSSGWTAGAAAYYVGYLQPRTFLLKYNENGTITDAVDCALDPLSETKCTLKSFTVEKGIYQTSNFRVQPTESIVRFPNITNLCPFGEVFNATRFASVYAWNRKRISNCVADYSVLYNSASFSTFKCYGVSPTKLNDLCFTNVYADSFVIRGDEVRQIAPGQTGKIADYNYKLPDDFTGCVIAWNSNNLDSKVGGNYNYRYRLFRKSNLKPFERDISTEIYQAGSTPCNGVQGFNCYFPLQSYGFQPTNGVGYQPYRVVVLSFELLHAPATVCGPKKSTNLVKNKCVNFNFNGLTGTGVLTESNKKFLPFQQFGRDIADTTDAVRDPQTLEILDITPCSFGGVSVITPGTNTSNQVAVLYQGVNCTEVPVAIHADQLTPTWRVYSTGSNVFQTRAGCLIGAEHVNNSYECDIPIGAGICASYQTQTNSRQQAQSVASQSIIAYTMSLGAENSVAYSNNSIAIPTNFTISVTTEILPVSMTKTSVDCTMYICGDSTECSNLLLQYGSFCTQLNRALTGIAVEQDKNTQEVFAQVKQIYKTPPIKDFGGFNFSQILPDPSKPSKRSFIEDLLFNKVTLADAGFIKQYGDCLGDIAARDLICAQKFNGLTVLPPLLTDEMIAQYTSALLAGTITSGWTFGAGAALQIPFAMQMAYRFNGIGVTQNVLYENQKLIANQFNSAIGKIQDSLSSTASALGKLQDVVNQNAQALNTLVKQLSSNFGAISSVLNDILSRLDPPEAEVQIDRLITGRLQSLQTYVTQQLIRAAEIRASANLAATKMSECVLGQSKRVDFCGKGYHLMSFPQSAPHGVVFLHVTYVPAHEKNFTTAPAICHDGKAHFPREGVFVSNGTHWFVTQRNFYEPQIITTDNTFVSGNCDVVIGIVNNTVYDPLQPELDSFKEELDKYFKNHTSPDVDLGDISGINASVVNIQKEIDRLNEVAKNLNESLIDLQELGKYEQYIKWPWYIWLGFIAGLIAIVMVTIMLCCMTSCCSCLKGCCSCGSCCKFDEDDSEPVLKGVKLHYT

SEQ ID NO: 182 - protein, 1258 aa, synthetic construct
  REGION 1..1258: note = Recombinant SARS-CoV-2 S Polypeptide
QCVNLRTRTQLPPAYTNSFTRGVYYPDKVFRSSVLHSTQDLFLPFFSNVTWFHAIHVSGTNGTKRFDNPVLPFNDGVYFASTEKSNIIRGWIFGTTLDSKTQSLLIVNNATNVVIKVCEFQFCNDPFLDVYYHKNNKSWMESGVYSSANNCTFEYVSQPFLMDLEGKQGNFKNLREFVFKNIDGYFKIYSKHTPINLVRDLPQGFSALEPLVDLPIGINITRFQTLLALHRSYLTPGDSSSGITAGAAAYYVGYLQPRTFLLKYNENGTITDAVDCALDPLSETKCTLKSFTVEKGIYQTSNFRVQPTESIVRFPNITNLCPFGEVFNATRFASVYAWNRKRISNCVADYSVLYNSASFSTFKCYGVSPTKLNDLCFTNVYADSFVIRGDEVRQIAPGQTGNIADYNYKLPDDFTGCVIAWNSNNLDSKVGGNYNYRYRLFRKSNLKPFERDISTEIYQAGSKPCNGVEGFNCYFPLQSYGFQPTNGVGYQPYRVVVLSFELLHAPATVCGPKKSTNLVKNKCVNFNFNGLTGTGVLTESNKKFLPFQQFGRDIADTTDAVRDPQTLEILDITPCSFGGVSVITPGTNTSNQVAVLYQGVNCTEVPVAIHADQLTPTWRVYSTGSNVFQTRAGCLIGAEHVNNSYECDIPIGAGICASYQTQTNSRQQAQSVASQSIIAYTMSLGAENSVAYSNNSIAIPTNFTISVTTEILPVSMTKTSVDCTMYICGDSTECSNLLLQYGSFCTQLNRALTGIAVEQDKNTQEVFAQVKQIYKTPPIKDFGGFNFSQILPDPSKPSKRSFIEDLLFNKVTLADAGFIKQYGDCLGDIAARDLICAQKFNGLTVLPPLLTDEMIAQYTSALLAGTITSGWTFGAGAALQIPFAMQMAYRFNGIGVTQNVLYENQKLIANQFNSAIGKIQDSLSSTASALGKLQNVVNQNAQALNTLVKQLSSNFGAISSVLNDILSRLDPPEAEVQIDRLITGRLQSLQTYVTQQLIRAAEIRASANLAATKMSECVLGQSKRVDFCGKGYHLMSFPQSAPHGVVFLHVTYVPAQEKNFTTAPAICHDGKAHFPREGVFVSNGTHWFVTQRNFYEPQIITTDNTFVSGNCDVVIGIVNNTVYDPLQPELDSFKEELDKYFKNHTSPDVDLGDISGINASVVNIQKEIDRLNEVAKNLNESLIDLQELGKYEQYIKWPWYIWLGFIAGLIAIVMVTIMLCCMTSCCSCLKGCCSCGSCCKFDEDDSEPVLKGVKLHYT

SEQ ID NO: 183 - protein, 1260 aa, synthetic construct
  REGION 1..1260: note = Recombinant SARS-CoV-2 S Polypeptide
QCVNLTTRTQLPPAYTNSFTRGVYYPDKVFRSSVLHSTQDLFLPFFSNVTWFHAIHVSGTNGTKRFDNPVLPFNDGVYFASIEKSNIIRGWIFGTTLDSKTQSLLIVNNATNVVIKVCEFQFCNDPFLGVSNHKNNKSWMESEFRVYSSANNCTFEYVSQPFLMDLEGKQGNFKNLREFVFKNIDGYFKIYSKHTPINLVRDLPQGFSALEPLVDLPIGINITRFQTLLALHRSYLTPGDSSSGWTAGAAAYYVGYLQPRTFLLKYNENGTITDAVDCALDPLSETKCTLKSFTVEKGIYQTSNFRVQPTESIVRFPNITNLCPFGEVFNATKFASVYAWNRKRISNCVADYSVLYNSASFSTFKCYGVSPTKLNDLCFTNVYADSFVIRGDEVRQIAPGQTGKIADYNYKLPDDFTGCVIAWNSNNLDSKVGGNYNYLYRLFRKSNLKPFERDISTEIYQAGSTPCNGVKGFNCYFPLQSYGFQPTYGVGYQPYRVVVLSFELLHAPATVCGPKKSTNLVKNKCVNFNFNGLTGTGVLTESNKKFLPFQQFGRDIADTTDAVRDPQTLEILDITPCSFGGVSVITPGTNTSNQVAVLYQGVNCTEVPVAIHADQLTPTWRVYSTGSNVFQTRAGCLIGAEHVNNSYECDIPIGAGICASYQTQTNSHQQAQSVASQSIIAYTMSLGAENSVAYSNNSIAIPTNFTISVTTEILPVSMTKTSVDCTMYICGDSTECSNLLLQYGSFCTQLNRALTGIAVEQDKNTQEVFAQVKQIYKTPPIKDFGGFNFSQILPDPSKPSKRSFIEDLLFNKVTLADAGFIKQYGDCLGDIAARDLICAQKFNGLTVLPPLLTDEMIAQYTSALLAGTITSGWTFGAGAALQIPFAMQMAYRFNGIGVTQNVLYENQKLIANQFNSAIGKIQDSLSSTASALGKLQNVVNQNAQALNTLVKQLSSNFGAISSVLNDILSRLDPPEAEVQIDRLITGRLQSLQTYVTQQLIRAAEIRASANLAATKMSECVLGQSKRVDFCGKGYHLMSFPQSAPHGVVFLHVTYVPAQEKNFTTAPAICHDGKAHFPREGVFVSNGTHWFVTQRNFYEPQIITTDNTFVSGNCDVVIGIVNNTVYDPLQPELDSFKEELDKYFKNHTSPDVDLGDISGINASVVNIQKEIDRLNEVAKNLNESLIDLQELGKYEQYIKWPWYIWLGFIAGLIAIVMVTIMLCCMTSCCSCLKGCCSCGSCCKFDEDDSEPVLKGVKLHYT

SEQ ID NO: 184 - protein, 1261 aa, synthetic construct
  REGION 1..1261: note = Recombinant SARS-CoV-2 S Polypeptide
QCVNLTTRTQLPPAYTNSFTRGVYYPDKVFRSSVLHSTQDLFLPFFSNVTWFHAIHVSGTNGTKRFDNPVLPFNDGVYFASIEKSNIIRGWIFGTTLDSKTQSLLIVNNATNVVIKVCEFQFCNDPFLGVTSNHKNNKSWMESEFRVYSSANNCTFEYVSQPFLMDLEGKQGNFKNLREFVFKNIDGYFKIYSKHTPINLVRDLPQGFSALEPLVDLPIGINITRFQTLLALHRSYLTPGDSSSGWTAGAAAYYVGYLQPRTFLLKYNENGTITDAVDCALDPLSETKCTLKSFTVEKGIYQTSNFRVQPTESIVRFPNITNLCPFGEVFNATKFASVYAWNRKRISNCVADYSVLYNSASFSTFKCYGVSPTKLNDLCFTNVYADSFVIRGDEVRQIAPGQTGKIADYNYKLPDDFTGCVIAWNSNNLDSKVGGNYNYLYRLFRKSNLKPFERDISTEIYQAGSTPCNGVKGFNCYFPLQSYGFQPTYGVGYQPYRVVVLSFELLHAPATVCGPKKSTNLVKNKCVNFNFNGLTGTGVLTESNKKFLPFQQFGRDIADTTDAVRDPQTLEILDITPCSFGGVSVITPGTNTSNQVAVLYQGVNCTEVPVAIHADQLTPTWRVYSTGSNVFQTRAGCLIGAEHVNNSYECDIPIGAGICASYQTQTNSHQQAQSVASQSIIAYTMSLGAENSVAYSNNSIAIPTNFTISVTTEILPVSMTKTSVDCTMYICGDSTECSNLLLQYGSFCTQLNRALTGIAVEQDKNTQEVFAQVKQIYKTPPIKDFGGFNFSQILPDPSKPSKRSFIEDLLFNKVTLADAGFIKQYGDCLGDIAARDLICAQKFNGLTVLPPLLTDEMIAQYTSALLAGTITSGWTFGAGAALQIPFAMQMAYRFNGIGVTQNVLYENQKLIANQFNSAIGKIQDSLSSTASALGKLQNVVNQNAQALNTLVKQLSSNFGAISSVLNDILSRLDPPEAEVQIDRLITGRLQSLQTYVTQQLIRAAEIRASANLAATKMSECVLGQSKRVDFCGKGYHLMSFPQSAPHGVVFLHVTYVPAQEKNFTTAPAICHDGKAHFPREGVFVSNGTHWFVTQRNFYEPQIITTDNTFVSGNCDVVIGIVNNTVYDPLQPELDSFKEELDKYFKNHTSPDVDLGDISGINASVVNIQKEIDRLNEVAKNLNESLIDLQELGKYEQYIKWPWYIWLGFIAGLIAIVMVTIMLCCMTSCCSCLKGCCSCGSCCKFDEDDSEPVLKGVKLHYT

SEQ ID NO: 185 - protein, 1270 aa, synthetic construct
  REGION 1..1270: note = Recombinant SARS-CoV-2 S Polypeptide
MFVFLVLLPLVSSQCVNLITRTQSYTNSFTRGVYYPDKVFRSSVLHSTQDLFLPFFSNVTWFHAIHVSGTNGTKRFDNPVLPFNDGVYFASTEKSNIIRGWIFGTTLDSKTQSLLIVNNATNVVIKVCEFQFCNDPFLDVYYHKNNKSWMESEFRVYSSANNCTFEYVSQPFLMDLEGKQGNFKNLREFVFKNIDGYFKIYSKHTPINLGRDLPQGFSALEPLVDLPIGINITRFQTLLALHRSYLTPGDSSSGWTAGAAAYYVGYLQPRTFLLKYNENGTITDAVDCALDPLSETKCTLKSFTVEKGIYQTSNFRVQPTESIVRFPNITNLCPFDEVFNATRFASVYAWNRKRISNCVADYSVLYNFAPFFAFKCYGVSPTKLNDLCFTNVYADSFVIRGNEVRQIAPGQTGNIADYNYKLPDDFTGCVIAWNSNKLDSKVGGNYNYQYRLFRKSNLKPFERDISTEIYQAGNKPCNGVAGFNCYFPLRSYGFRPTYGVGHQPYRVVVLSFELLHAPATVCGPKKSTNLVKNKCVNFNFNGLTGTGVLTESNKKFLPFQQFGRDIADTTDAVRDPQTLEILDITPCSFGGVSVITPGTNTSNQVAVLYQGVNCTEVPVAIHADQLTPTWRVYSTGSNVFQTRAGCLIGAEYVNNSYECDIPIGAGICASYQTQTKSHQQAQSVASQSIIAYTMSLGAENLVAYSNNSIAIPTNFTISVTTEILPVSMTKTSVDCTMYICGDSTECSNLLLQYGSFCTQLKRALTGIAVEQDKNTQEVFAQVKQIYKTPPIKYFGGFNFSQILPDPSKPSKRSFIEDLLFNKVTLADAGFIKQYGDCLGDIAARDLICAQKFNGLTVLPPLLTDEMIAQYTSALLAGTITSGWTFGAGAALQIPFAMQMAYRFNGIGVTQNVLYENQKLIANQFNSAIGKIQDSLSSTASALGKLQDVVNHNAQALNTLVKQLSSKFGAISSVLNDILSRLDPPEAEVQIDRLITGRLQSLQTYVTQQLIRAAEIRASANLAATKMSECVLGQSKRVDFCGKGYHLMSFPQSAPHGVVFLHVTYVPAQEKNFTTAPAICHDGKAHFPREGVFVSNGTHWFVTQRNFYEPQIITTDNTFVSGNCDVVIGIVNNTVYDPLQPELDSFKEELDKYFKNHTSPDVDLGDISGINASVVNIQKEIDRLNEVAKNLNESLIDLQELGKYEQYIKWPWYIWLGFIAGLIAIVMVTIMLCCMTSCCSCLKGCCSCGSCCKFDEDDSEPVLKGVKLHYT

SEQ ID NO: 186 - protein, 1257 aa, synthetic construct
  REGION 1..1257: note = Recombinant SARS-CoV-2 S Polypeptide
QCVNLITRTQSYTNSFTRGVYYPDKVFRSSVLHSTQDLFLPFFSNVTWFHAIHVSGTNGTKRFDNPVLPFNDGVYFASTEKSNIIRGWIFGTTLDSKTQSLLIVNNATNVVIKVCEFQFCNDPFLDVYYHKNNKSWMESEFRVYSSANNCTFEYVSQPFLMDLEGKQGNFKNLREFVFKNIDGYFKIYSKHTPINLGRDLPQGFSALEPLVDLPIGINITRFQTLLALHRSYLTPGDSSSGWTAGAAAYYVGYLQPRTFLLKYNENGTITDAVDCALDPLSETKCTLKSFTVEKGIYQTSNFRVQPTESIVRFPNITNLCPFDEVFNATRFASVYAWNRKRISNCVADYSVLYNFAPFFAFKCYGVSPTKLNDLCFTNVYADSFVIRGNEVRQIAPGQTGNIADYNYKLPDDFTGCVIAWNSNKLDSKVGGNYNYQYRLFRKSNLKPFERDISTEIYQAGNKPCNGVAGFNCYFPLRSYGFRPTYGVGHQPYRVVVLSFELLHAPATVCGPKKSTNLVKNKCVNFNFNGLTGTGVLTESNKKFLPFQQFGRDIADTTDAVRDPQTLEILDITPCSFGGVSVITPGTNTSNQVAVLYQGVNCTEVPVAIHADQLTPTWRVYSTGSNVFQTRAGCLIGAEYVNNSYECDIPIGAGICASYQTQTKSHQQAQSVASQSIIAYTMSLGAENLVAYSNNSIAIPTNFTISVTTEILPVSMTKTSVDCTMYICGDSTECSNLLLQYGSFCTQLKRALTGIAVEQDKNTQEVFAQVKQIYKTPPIKYFGGFNFSQILPDPSKPSKRSFIEDLLFNKVTLADAGFIKQYGDCLGDIAARDLICAQKFNGLTVLPPLLTDEMIAQYTSALLAGTITSGWTFGAGAALQIPFAMQMAYRFNGIGVTQNVLYENQKLIANQFNSAIGKIQDSLSSTASALGKLQDVVNHNAQALNTLVKQLSSKFGAISSVLNDILSRLDPPEAEVQIDRLITGRLQSLQTYVTQQLIRAAEIRASANLAATKMSECVLGQSKRVDFCGKGYHLMSFPQSAPHGVVFLHVTYVPAQEKNFTTAPAICHDGKAHFPREGVFVSNGTHWFVTQRNFYEPQIITTDNTFVSGNCDVVIGIVNNTVYDPLQPELDSFKEELDKYFKNHTSPDVDLGDISGINASVVNIQKEIDRLNEVAKNLNESLIDLQELGKYEQYIKWPWYIWLGFIAGLIAIVMVTIMLCCMTSCCSCLKGCCSCGSCCKFDEDDSEPVLKGVKLHYT

SEQ ID NO: 187 - protein, 1270 aa, synthetic construct; identical to SEQ ID NO: 170
  REGION 1..1270: note = Recombinant SARS-CoV-2 S Polypeptide

SEQ ID NO: 188 - protein, 1257 aa, synthetic construct
  REGION 1..1257: note = Recombinant SARS-CoV-2 S Polypeptide
QCVNLTTRTQLPPAYTNSFTRGVYYPDKVFRSSVLHSTQDLFLPFFSNVTWFHVISGTNGTKRFDNPVLPFNDGVYFASIEKSNIIRGWIFGTTLDSKTQSLLIVNNATNVVIKVCEFQFCNDPFLDHKNNKSWMESEFRVYSSANNCTFEYVSQPFLMDLEGKQGNFKNLREFVFKNIDGYFKIYSKHTPIIVREPEDLPQGFSALEPLVDLPIGINITRFQTLLALHRSYLTPGDSSSGWTAGAAAYYVGYLQPRTFLLKYNENGTITDAVDCALDPLSETKCTLKSFTVEKGIYQTSNFRVQPTESIVRFPNITNLCPFDEVFNATRFASVYAWNRKRISNCVADYSVLYNSAPFFTFKCYGVSPTKLNDLCFTNVYADSFVIRGDEVRQIAPGQTGNIADYNYKLPDDFTGCVIAWNSNKLDSKVSGNYNYLYRLFRKSNLKPFERDISTEIYQAGNKPCNGVAGFNCYFPLRSYSFRPTYGVGHQPYRVVVLSFELLHAPATVCGPKKSTNLVKNKCVNFNFNGLKGTGVLTESNKKFLPFQQFGRDIADTTDAVRDPQTLEILDITPCSFGGVSVITPGTNTSNQVAVLYQGVNCTEVPVAIHADQLTPTWRVYSTGSNVFQTRAGCLIGAEYVNNSYECDIPIGAGICASYQTQTKSHQQAQSVASQSIIAYTMSLGAENSVAYSNNSIAIPTNFTISVTTEILPVSMTKTSVDCTMYICGDSTECSNLLLQYGSFCTQLKRALTGIAVEQDKNTQEVFAQVKQIYKTPPIKYFGGFNFSQILPDPSKPSKRSFIEDLLFNKVTLADAGFIKQYGDCLGDIAARDLICAQKFKGLTVLPPLLTDEMIAQYTSALLAGTITSGWTFGAGAALQIPFAMQMAYRFNGIGVTQNVLYENQKLIANQFNSAIGKIQDSLSSTASALGKLQDVVNHNAQALNTLVKQLSSKFGAISSVLNDIFSRLDPPEAEVQIDRLITGRLQSLQTYVTQQLIRAAEIRASANLAATKMSECVLGQSKRVDFCGKGYHLMSFPQSAPHGVVFLHVTYVPAQEKNFTTAPAICHDGKAHFPREGVFVSNGTHWFVTQRNFYEPQIITTDNTFVSGNCDVVIGIVNNTVYDPLQPELDSFKEELDKYFKNHTSPDVDLGDISGINASVVNIQKEIDRLNEVAKNLNESLIDLQELGKYEQYIKWPWYIWLGFIAGLIAIVMVTIMLCCMTSCCSCLKGCCSCGSCCKFDEDDSEPVLKGVKLHYT

SEQ ID NO: 189 - protein, 1268 aa, synthetic construct
  REGION 1..1268: note = Recombinant SARS-CoV-2 S Polypeptide
MFGFLVLLPLVSSQCVNLITRTQSYTNSFTRGVYYPDKVFRSSVLHSTQDLFLPFFSNVTWFHAISGTNGTKRFDNPVLPFNDGVYFASTEKSNIIRGWIFGTTLDSKTQSLLIVNNATNVVIKVCEFQFCNDPFLDVYYHKNNKSWMESEFRVYSSANNCTFEYVSQPFLMDLEGKQGNFKNLREFVFKNIDGYFKIYSKHTPINLGRDLPQGFSALEPLVDLPIGINITRFQTLLALHRSYLTPGDSSSGWTAGAAAYYVGYLQPRTFLLKYNENGTITDAVDCALDPLSETKCTLKSFTVEKGIYQTSNFRVQPTESIVRFPNITNLCPFDEVFNATRFASVYAWNRKRISNCVADYSVLYNFAPFFAFKCYGVSPTKLNDLCFTNVYADSFVIRGNEVSQIAPGQTGNIADYNYKLPDDFTGCVIAWNSNNLDSKVGGNYNYRYRLFRKSNLKPFERDISTEIYQAGNKPCNGVAGVNCYFPLQSYGFRPTYGVGHQPYRVVVLSFELLHAPATVCGPKKSTNLVKNKCVNFNFNGLTGTGVLTESNKKFLPFQQFGRDIADTTDAVRDPQTLEILDITPCSFGGVSVITPGTNTSNQVAVLYQGVNCTEVPVAIHADQLTPTWRVYSTVSNVFQTRAGCLIGAEYVNNSYECDIPIGAGICASYQTQTKSHQQAQSVASQSIIAYTMSLGAENSVAYSNNSIAIPTNFTISVTTEILPVSMTKTSVDCTMYICGDSTECSNLLLQYGSFCTQLKRALTGIAVEQDKNTQEVFAQVKQIYKTPPIKYFGGFNFSQILPDPSKPSKRSFIEDLLFNKVTLADAGFIKQYGDCLGDIAARDLICAQKFNGLTVLPPLLTDEMIAQYTSALLAGTITSGWTFGAGAALQIPFAMQMAYRFNGIGVTQNVLYENQKLIANQFNSAIGKIQDSLSSTASALGKLQDVVNHNAQALNTLVKQLSSKFGAISSVLNDILSRLDPPEAEVQIDRLITGRLQSLQTYVTQQLIRAAEIRASANLAATKMSECVLGQSKRVDFCGKGYHLMSFPQSAPHGVVFLHVTYVPAQEKNFTTAPAICHDGKAHFPREGVFVSNGTHWFVTQRNFYEPQIITTDNTFVSGNCDVVIGIVNNTVYDPLQPELDSFKEELDKYFKNHTSPDVDLGDISGINASVVNIQKEIDRLNEVAKNLNESLIDLQELGKYEQYIKWPWYIWLGFIAGLIAIVMVTIMLCCMTSCCSCLKGCCSCGSCCKFDEDDSEPVLKGVKLHYT

SEQ ID NO: 190 - protein, 1255 aa, synthetic construct
  REGION 1..1255: note = Recombinant SARS-CoV-2 S Polypeptide
QCVNLITRTQSYTNSFTRGVYYPDKVFRSSVLHSTQDLFLPFFSNVTWFHAISGTNGTKRFDNPVLPFNDGVYFASTEKSNIIRGWIFGTTLDSKTQSLLIVNNATNVVIKVCEFQFCNDPFLDVYYHKNNKSWMESEFRVYSSANNCTFEYVSQPFLMDLEGKQGNFKNLREFVFKNIDGYFKIYSKHTPINLGRDLPQGFSALEPLVDLPIGINITRFQTLLALHRSYLTPGDSSSGWTAGAAAYYVGYLQPRTFLLKYNENGTITDAVDCALDPLSETKCTLKSFTVEKGIYQTSNFRVQPTESIVRFPNITNLCPFDEVFNATRFASVYAWNRKRISNCVADYSVLYNFAPFFAFKCYGVSPTKLNDLCFTNVYADSFVIRGNEVSQIAPGQTGNIADYNYKLPDDFTGCVIAWNSNNLDSKVGGNYNYRYRLFRKSNLKPFERDISTEIYQAGNKPCNGVAGVNCYFPLQSYGFRPTYGVGHQPYRVVVLSFELLHAPATVCGPKKSTNLVKNKCVNFNFNGLTGTGVLTESNKKFLPFQQFGRDIADTTDAVRDPQTLEILDITPCSFGGVSVITPGTNTSNQVAVLYQGVNCTEVPVAIHADQLTPTWRVYSTVSNVFQTRAGCLIGAEYVNNSYECDIPIGAGICASYQTQTKSHQQAQSVASQSIIAYTMSLGAENSVAYSNNSIAIPTNFTISVTTEILPVSMTKTSVDCTMYICGDSTECSNLLLQYGSFCTQLKRALTGIAVEQDKNTQEVFAQVKQIYKTPPIKYFGGFNFSQILPDPSKPSKRSFIEDLLFNKVTLADAGFIKQYGDCLGDIAARDLICAQKFNGLTVLPPLLTDEMIAQYTSALLAGTITSGWTFGAGAALQIPFAMQMAYRFNGIGVTQNVLYENQKLIANQFNSAIGKIQDSLSSTASALGKLQDVVNHNAQALNTLVKQLSSKFGAISSVLNDILSRLDPPEAEVQIDRLITGRLQSLQTYVTQQLIRAAEIRASANLAATKMSECVLGQSKRVDFCGKGYHLMSFPQSAPHGVVFLHVTYVPAQEKNFTTAPAICHDGKAHFPREGVFVSNGTHWFVTQRNFYEPQIITTDNTFVSGNCDVVIGIVNNTVYDPLQPELDSFKEELDKYFKNHTSPDVDLGDISGINASVVNIQKEIDRLNEVAKNLNESLIDLQELGKYEQYIKWPWYIWLGFIAGLIAIVMVTIMLCCMTSCCSCLKGCCSCGSCCKFDEDDSEPVLKGVKLHYT

SEQ ID NO: 191 - protein, 1268 aa, synthetic construct
  REGION 1..1268: note = Recombinant SARS-CoV-2 S Polypeptide
MFVFLVLLPLVSSQCVNLITRTQSYTNSFTRGVYYPDKVFRSSVLHSTQDLFLPFFSNVTWFHAISGTNGTKRFDNPVLPFNDGVYFASTEKSNIIRGWIFGTTLDSKTQSLLIVNNATNVVIKVCEFQFCNDPFLDVYYHKNNKSWMESEFRVYSSANNCTFEYVSQPFLMDLEGKQGNFKNLREFVFKNIDGYFKIYSKHTPINLGRDLPQGFSALEPLVDLPIGINITRFQTLLALHRSYLTPGDSSSGWTAGAAAYYVGYLQPRTFLLKYNENGTITDAVDCALDPLSETKCTLKSFTVEKGIYQTSNFRVQPTESIVRFPNITNLCPFDEVFNATRFASVYAWNRKRISNCVADYSVLYNFAPFFAFKCYGVSPTKLNDLCFTNVYADSFVIRGNEVSQIAPGQTGNIADYNYKLPDDFTGCVIAWNSNKLDSKVGGNYNYRYRLFRKSNLKPFERDISTEIYQAGNKPCNGVAGVNCYFPLQSYGFRPTYGVGHQPYRVVVLSFELLHAPATVCGPKKSTNLVKNKCVNFNFNGLTGTGVLTESNKKFLPFQQFGRDIADTTDAVRDPQTLEILDITPCSFGGVSVITPGTNTSNQVAVLYQGVNCTEVPVAIHADQLTPTWRVYSTGSNVFQTRAGCLIGAEYVNNSYECDIPIGAGICASYQTQTKSHQQAQSVASQSIIAYTMSLGAENSVAYSNNSIAIPTNFTISVTTEILPVSMTKTSVDCTMYICGDSTECSNLLLQYGSFCTQLKRALTGIAVEQDKNTQEVFAQVKQIYKTPPIKYFGGFNFSQILPDPSKPSKRSFIEDLLFNKVTLADAGFIKQYGDCLGDIAARDLICAQKFNGLTVLPPLLTDEMIAQYTSALLAGTITSGWTFGAGAALQIPFAMQMAYRFNGIGVTQNVLYENQKLIANQFNSAIGKIQDSLSSTASALGKLQDVVNHNAQALNTLVKQLSSKFGAISSVLNDILSRLDPPEAEVQIDRLITGRLQSLQTYVTQQLIRAAEIRASANLAATKMSECVLGQSKRVDFCGKGYHLMSFPQSAPHGVVFLHVTYVPAQEKNFTTAPAICHDGKAHFPREGVFVSNGTHWFVTQRNFYEPQIITTDNTFVSGNCDVVIGIVNNTVYDPLQPELDSFKEELDKYFKNHTSPDVDLGDISGINASVVNIQKEIDRLNEVAKNLNESLIDLQELGKYEQYIKWPWYIWLGFIAGLIAIVMVTIMLCCMTSCCSCLKGCCSCGSCCKFDEDDSEPVLKGVKLHYT

SEQ ID NO: 192 - protein, 1255 aa, synthetic construct
  REGION 1..1255: note = Recombinant SARS-CoV-2 S Polypeptide
QCVNLITRTQSYTNSFTRGVYYPDKVFRSSVLHSTQDLFLPFFSNVTWFHAISGTNGTKRFDNPVLPFNDGVYFASTEKSNIIRGWIFGTTLDSKTQSLLIVNNATNVVIKVCEFQFCNDPFLDVYYHKNNKSWMESEFRVYSSANNCTFEYVSQPFLMDLEGKQGNFKNLREFVFKNIDGYFKIYSKHTPINLGRDLPQGFSALEPLVDLPIGINITRFQTLLALHRSYLTPGDSSSGWTAGAAAYYVGYLQPRTFLLKYNENGTITDAVDCALDPLSETKCTLKSFTVEKGIYQTSNFRVQPTESIVRFPNITNLCPFDEVFNATRFASVYAWNRKRISNCVADYSVLYNFAPFFAFKCYGVSPTKLNDLCFTNVYADSFVIRGNEVSQIAPGQTGNIADYNYKLPDDFTGCVIAWNSNKLDSKVGGNYNYRYRLFRKSNLKPFERDISTEIYQAGNKPCNGVAGVNCYFPLQSYGFRPTYGVGHQPYRVVVLSFELLHAPATVCGPKKSTNLVKNKCVNFNFNGLTGTGVLTESNKKFLPFQQFGRDIADTTDAVRDPQTLEILDITPCSFGGVSVITPGTNTSNQVAVLYQGVNCTEVPVAIHADQLTPTWRVYSTGSNVFQTRAGCLIGAEYVNNSYECDIPIGAGICASYQTQTKSHQQAQSVASQSIIAYTMSLGAENSVAYSNNSIAIPTNFTISVTTEILPVSMTKTSVDCTMYICGDSTECSNLLLQYGSFCTQLKRALTGIAVEQDKNTQEVFAQVKQIYKTPPIKYFGGFNFSQILPDPSKPSKRSFIEDLLFNKVTLADAGFIKQYGDCLGDIAARDLICAQKFNGLTVLPPLLTDEMIAQYTSALLAGTITSGWTFGAGAALQIPFAMQMAYRFNGIGVTQNVLYENQKLIANQFNSAIGKIQDSLSSTASALGKLQDVVNHNAQALNTLVKQLSSKFGAISSVLNDILSRLDPPEAEVQIDRLITGRLQSLQTYVTQQLIRAAEIRASANLAATKMSECVLGQSKRVDFCGKGYHLMSFPQSAPHGVVFLHVTYVPAQEKNFTTAPAICHDGKAHFPREGVFVSNGTHWFVTQRNFYEPQIITTDNTFVSGNCDVVIGIVNNTVYDPLQPELDSFKEELDKYFKNHTSPDVDLGDISGINASVVNIQKEIDRLNEVAKNLNESLIDLQELGKYEQYIKWPWYIWLGFIAGLIAIVMVTIMLCCMTSCCSCLKGCCSCGSCCKFDEDDSEPVLKGVKLHYT

SEQ ID NO: 193 - protein, 13 aa, synthetic construct
  REGION 1..13: note = signal peptide
MFGFLVLLPLVSS

SEQ ID NO: 194 - protein, 1270 aa, synthetic construct
  REGION 1..1270: note = Recombinant SARS-CoV-2 S Polypeptide
MFVFLVLLPLVSSQCVNLITRTQSYTNSFTRGVYYPDKVFRSSVLHSTQDLFLPFFSNVTWFHAIHVSGTNGTKRFDNPVLPFNDGVYFASTEKSNIIRGWIFGTTLDSKTQSLLIVNNATNVVIKVCEFQFCNDPFLDVYYHKNNKSWMESEFRVYSSANNCTFEYVSQPFLMDLEGKQGNFKNLREFVFKNIDGYFKIYSKHTPINLGRDLPQGFSALEPLVDLPIGINITRFQTLLALHRSYLTPGDSSSGWTAGAAAYYVGYLQPRTFLLKYNENGTITDAVDCALDPLSETKCTLKSFTVEKGIYQTSNFRVQPTESIVRFPNITNLCPFDEVFNATRFASVYAWNRKRISNCVADYSVLYNFAPFFAFKCYGVSPTKLNDLCFTNVYADSFVIRGNEVSQIAPGQTGNIADYNYKLPDDFTGCVIAWNSNKLDSKVGGNYNYLYRLFRKSNLKPFERDISTEIYQAGNKPCNGVAGFNCYFPLRSYGFRPTYGVGHQPYRVVVLSFELLHAPATVCGPKKSTNLVKNKCVNFNFNGLTGTGVLTESNKKFLPFQQFGRDIADTTDAVRDPQTLEILDITPCSFGGVSVITPGTNTSNQVAVLYQGVNCTEVPVAIHADQLTPTWRVYSTGSNVFQTRAGCLIGAEYVNNSYECDIPIGAGICASYQTQTKSHQQAQSVASQSIIAYTMSLGAENSVAYSNNSIAIPTNFTISVTTEILPVSMTKTSVDCTMYICGDSTECSNLLLQYGSFCTQLKRALTGIAVEQDKNTQEVFAQVKQIYKTPPIKYFGGFNFSQILPDPSKPSKRSFIEDLLFNKVTLADAGFIKQYGDCLGDIAARDLICAQKFNGLTVLPPLLTDEMIAQYTSALLAGTITSGWTFGAGAALQIPFAMQMAYRFNGIGVTQNVLYENQKLIANQFNSAIGKIQDSLSSTASALGKLQDVVNHNAQALNTLVKQLSSKFGAISSVLNDILSRLDPPEAEVQIDRLITGRLQSLQTYVTQQLIRAAEIRASANLAATKMSECVLGQSKRVDFCGKGYHLMSFPQSAPHGVVFLHVTYVPAQEKNFTTAPAICHDGKAHFPREGVFVSNGTHWFVTQRNFYEPQIITTDNTFVSGNCDVVIGIVNNTVYDPLQPELDSFKEELDKYFKNHTSPDVDLGDISGINASVVNIQKEIDRLNEVAKNLNESLIDLQELGKYEQYIKWPWYIWLGFIAGLIAIVMVTIMLCCMTSCCSCLKGCCSCGSCCKFDEDDSEPVLKGVKLHYT

SEQ ID NO: 195 - protein, 1257 aa, synthetic construct
  REGION 1..1257: note = Recombinant SARS-CoV-2 S Polypeptide
QCVNLITRTQSYTNSFTRGVYYPDKVFRSSVLHSTQDLFLPFFSNVTWFHAIHVSGTNGTKRFDNPVLPFNDGVYFASTEKSNIIRGWIFGTTLDSKTQSLLIVNNATNVVIKVCEFQFCNDPFLDVYYHKNNKSWMESEFRVYSSANNCTFEYVSQPFLMDLEGKQGNFKNLREFVFKNIDGYFKIYSKHTPINLGRDLPQGFSALEPLVDLPIGINITRFQTLLALHRSYLTPGDSSSGWTAGAAAYYVGYLQPRTFLLKYNENGTITDAVDCALDPLSETKCTLKSFTVEKGIYQTSNFRVQPTESIVRFPNITNLCPFDEVFNATRFASVYAWNRKRISNCVADYSVLYNFAPFFAFKCYGVSPTKLNDLCFTNVYADSFVIRGNEVSQIAPGQTGNIADYNYKLPDDFTGCVIAWNSNKLDSKVGGNYNYLYRLFRKSNLKPFERDISTEIYQAGNKPCNGVAGFNCYFPLRSYGFRPTYGVGHQPYRVVVLSFELLHAPATVCGPKKSTNLVKNKCVNFNFNGLTGTGVLTESNKKFLPFQQFGRDIADTTDAVRDPQTLEILDITPCSFGGVSVITPGTNTSNQVAVLYQGVNCTEVPVAIHADQLTPTWRVYSTGSNVFQTRAGCLIGAEYVNNSYECDIPIGAGICASYQTQTKSHQQAQSVASQSIIAYTMSLGAENSVAYSNNSIAIPTNFTISVTTEILPVSMTKTSVDCTMYICGDSTECSNLLLQYGSFCTQLKRALTGIAVEQDKNTQEVFAQVKQIYKTPPIKYFGGFNFSQILPDPSKPSKRSFIEDLLFNKVTLADAGFIKQYGDCLGDIAARDLICAQKFNGLTVLPPLLTDEMIAQYTSALLAGTITSGWTFGAGAALQIPFAMQMAYRFNGIGVTQNVLYENQKLIANQFNSAIGKIQDSLSSTASALGKLQDVVNHNAQALNTLVKQLSSKFGAISSVLNDILSRLDPPEAEVQIDRLITGRLQSLQTYVTQQLIRAAEIRASANLAATKMSECVLGQSKRVDFCGKGYHLMSFPQSAPHGVVFLHVTYVPAQEKNFTTAPAICHDGKAHFPREGVFVSNGTHWFVTQRNFYEPQIITTDNTFVSGNCDVVIGIVNNTVYDPLQPELDSFKEELDKYFKNHTSPDVDLGDISGINASVVNIQKEIDRLNEVAKNLNESLIDLQELGKYEQYIKWPWYIWLGFIAGLIAIVMVTIMLCCMTSCCSCLKGCCSCGSCCKFDEDDSEPVLKGVKLHYT

SEQ ID NO: 196 - DNA, 3813 bp, synthetic construct
  source 1..3813: mol_type = other DNA
atgttcgtcttcctggtgctgctgcccctggtgtccagccagtgcgtgaacctgaccactaggactcagctgcctcccgcttacaccaactcattcactcgcggtgtgtactaccctgacaaggtcttccgttcttcagtgctgcactcaactcaggacctgttcctgcccttcttctccaacgtcacctggttccacgtcatctccggcaccaacggcactaagcgcttcgacaacccagtgctgcctttcaacgacggtgtctacttcgcttcaattgagaagtccaacatcatccgtggatggatcttcggcaccactctggacagcaagactcagtctctgctgatcgtcaacaacgccaccaacgtggtcatcaaggtctgcgaattccagttctgcaacgacccattcctggaccacaagaacaacaagtcatggatggagtccgaattccgcgtctactccagcgctaacaactgcactttcgagtacgtgtcccagcctttcctgatggacctggaaggaaagcagggtaacttcaagaacctgagggagttcgtgttcaagaacatcgacggatacttcaagatttacagcaagcacaccccaatcattgtgcgcgagccggaggacctgcctcagggtttctctgctctggagccactggtggacctgcctatcggcatcaacatcacccgcttccagactctgctggctctgcaccgttcctacctgactccaggcgactcatcttctggatggactgctggagctgctgcttactacgtgggctacctgcagcctcgcaccttcctgctgaagtacaacgaaaacggaaccatcactgacgccgtcgactgcgctctggaccctctgtcagaaaccaagtgcactctgaagtccttcaccgtggagaagggcatctaccagacttcaaacttcagggtgcagcccaccgaatccatcgtcagattccctaacatcactaacctgtgccccttcgacgaggtcttcaacgccacccgcttcgcttccgtgtacgcctggaacaggaagagaatctcaaactgcgtcgctgactactccgtgctgtacaaccttgccccgttctttaccttcaagtgctacggcgtgtcaccaactaagctgaacgacctgtgcttcaccaacgtctacgccgactccttcgtgatcaggggagacgaggtcagacagatcgctcctggccagactggaaatatcgccgactacaactacaagctgcccgacgacttcaccggttgcgtcatcgcttggaacagcaacaaactggactctaaagtgagtggcaactacaactacctgtaccgcctgttccgtaagtcaaacctgaagccattcgagagggacatcagcactgaaatctaccaggccggaaataaaccttgcaacggtgtcgcgggcttcaactgctacttccccctgaggtcctactctttccgaccaacttatggtgtgggccaccagccttacagagtggtcgtgctgagcttcgaactgctccacgctcctgctactgtgtgcggtccaaagaagtctaccaacctggtcaagaacaagtgcgtgaacttcaacttcaacggcctgaaaggaactggtgtcctgaccgagagcaacaagaagttcctgcccttccagcagttcggaagggacatcgctgacaccactgacgctgtgcgcgaccctcagaccctggaaatcctggacatcactccatgctcattcggaggtgtctccgtgatcacccctggcaccaacacttctaaccaggtcgctgtgctgtaccagggcgtcaactgcaccgaggtccctgtggccatccacgctgaccagctgacccccacttggcgcgtgtactccaccggcagcaacgtgttccagactcgtgctggttgcctgatcggcgccgagtacgtgaacaacagctacgaatgcgacatccccatcggcgctggaatctgcgcctcttaccagacccagactaagagccaccagcaggctcagtctgtggcctctcagtcaatcatcgcttacaccatgtcactgggcgctgaaaactccgtggcctactctaacaactcaatcgccatccccaccaacttcactatcagcgtgaccactgagatcctgccagtcagcatgaccaagacttctgtggactgcactatgtacatctgcggagacagcaccgaatgctctaacctgctgctgcagtacggctctttctgcacccagctgaagcgtgctctgactggaatcgccgtggagcaggacaagaacactcaggaagtcttcgctcaggtgaagcaaatctacaagaccccacctatcaagtacttcggcggattcaacttctcccagatcctgcctgacccctccaagccaagcaagcgctctttcatcgaggacctgctgttcaacaaggtcactctggccgacgctggattcatcaagcagtacggagactgcctgggtgacatcgccgctcgtgacctgatctgcgctcagaagttcaagggtctgaccgtgctgcccccactgctgactgacgaaatgatcgcccagtacactagcgccctgctggctggaaccatcacttctggttggaccttcggtgctggcgccgctctgcagatccctttcgctatgcagatggcctaccgtttcaacggaatcggtgtcacccagaacgtgctgtacgagaaccagaagctgatcgctaaccagttcaactcagccatcggaaagatccaggacagcctgagctctactgcctctgctctgggcaagctgcaggacgtcgtgaaccataacgcccaggctctgaacaccctggtcaagcagctgtcatccaagttcggtgctatcagctctgtgctgaacgacatcttctcccgcctggaccctcccgaggccgaagtgcagatcgaccgcctgatcactggccgtctgcagtcactgcagacctacgtgactcagcagctgatcagggccgctgaaatcagagcctccgctaacctggccgctaccaagatgagcgagtgcgtcctgggtcaatctaagcgtgtggacttctgcggcaagggataccacctgatgtcattccctcagtctgctccccacggtgtggtgttcctgcacgtcacctacgtgccagcccaggagaagaacttcaccactgcccctgctatctgccacgacggcaaggctcacttccccagggaaggtgtcttcgtgagcaacggcacccactggttcgtcactcagagaaacttctacgagccacagatcatcaccactgacaacactttcgtgtctggaaactgcgacgtggtcatcggtatcgtcaacaacaccgtgtacgaccccctgcagccagagctggactcattcaaggaggaactggacaagtacttcaagaaccacacctcccctgacgtcgacctgggcgacatctcaggaatcaacgcttccgtcgtgaacatccagaaggagatcgaccgcctgaacgaagtggccaagaacctgaacgaaagcctgatcgacctgcaggagctgggcaagtacgaacagtacatcaagtggccttggtacatctggctgggtttcatcgctggcctcatcgctatcgtgatggtgaccatcatgctgtgctgcatgacttcatgctgctcctgcctgaagggctgctgcagctgcggatcttgctgcaagttcgacgaggacgactctgaacccgtcctgaagggcgtgaagctgcactacacctaa

SEQ ID NO: 197 - DNA, 3813 bp, synthetic construct
  source 1..3813: mol_type = other DNA
atgttcgtcttcctggtgctgctgcctctggtctccagccagtgcgtgaacctgatcaccaggactcagtcctacaccaacagcttcactagaggtgtgtactaccctgacaaggtcttccgctcttcagtgctgcactctactcaggacctgttcctgcccttcttctcaaacgtcacctggttccacgccatccacgtgtccggcaccaacggcactaagagattcgacaacccagtgctgcctttcaacgacggcgtctacttcgcttctaccgagaagtcaaacatcatccgcggatggatcttcggcaccactctggactccaagactcagagcctgctgatcgtcaacaacgccaccaacgtggtcatcaaggtgtgcgaattccagttctgcaacgacccattcctggacgtgtactaccacaagaacaacaagtcttggatggagtcagaattcagagtctactccagcgctaacaactgcactttcgagtacgtgtctcagcctttcctgatggacctggaaggaaagcagggtaacttcaagaacctgcgtgagttcgtcttcaagaacatcgacggttacttcaagatttactctaagcacaccccaatcaacctgggtagggacctgcctcagggcttctcagctctggagccactggtggacctgcctatcggcatcaacatcaccaggttccagactctgctggctctgcacagaagctacctgactccaggagactcatcttctggatggactgctggagctgctgcttactacgtgggttacctgcagcctcgcaccttcctgctgaagtacaacgaaaacggcaccatcactgacgccgtcgactgcgctctggaccctctgtctgaaaccaagtgcactctgaagtcattcaccgtggagaagggcatctaccagacttccaacttccgcgtgcagcccaccgaaagcatcgtccgtttccctaacatcactaacctgtgccccttcgacgaggtcttcaacgccacccgtttcgcttctgtgtacgcctggaaccgcaagcgtatctctaactgcgtcgccgactactcagtgctgtacaacttcgctcccttcttcgccttcaagtgctacggagtgtcaccaactaagctgaacgacctgtgcttcaccaacgtctacgctgactctttcgtgatcaggggtaacgaggtctcacagatcgctccaggccagactggaaacatcgccgactacaactacaagctgcctgacgacttcaccggttgcgtcatcgcttggaactccaacaagctggacagcaaagtgggtggcaactacaactacctgtacaggctgttcagaaagtccaacctgaagcccttcgagcgtgacatcagcactgaaatctaccaggctggtaacaagccatgcaacggtgtcgccggcttcaactgctacttccccctgcgctcctacggcttccgtccaacctacggtgtgggccaccagccttacagggtggtcgtgctgtccttcgaactcctccacgctccagctactgtgtgcggaccaaagaagagcaccaacctggtcaagaacaagtgcgtgaacttcaacttcaacggtctgaccggaactggtgtcctgaccgagtctaacaagaagttcctgcccttccagcagttcggtcgtgacatcgctgacactaccgacgccgtgagggacccccagaccctggaaatcctggacatcactccatgctctttcggaggtgtctcagtgatcactccaggaaccaacacttcaaaccaggtcgctgtgctgtaccagggtgtcaactgcaccgaagtccctgtggccatccacgctgaccagctgacccccacttggagagtgtacagcaccggctctaacgtcttccagactcgcgctggttgcctgatcggcgccgagtacgtgaacaactcttacgaatgcgacatccccatcggcgctggaatctgcgcctcataccagacccagactaagtcccaccagcaggctcagagcgtcgcctcacagtccatcatcgcttacaccatgtctctgggcgctgaaaactcagtggcctactcaaacaactccatcgccatccctaccaacttcactatctccgtgaccactgagatcctgcccgtctccatgaccaagactagcgtggactgcactatgtacatctgcggagactccaccgaatgcagcaacctgctgctgcagtacggtagcttctgcacccagctgaagcgtgctctgactggcatcgccgtggagcaggacaagaacactcaggaagtcttcgctcaggtgaagcaaatctacaagacccctcccatcaagtacttcggcggattcaacttctcccagatcctgcctgaccccagcaagccatctaagagatcattcatcgaggacctgctgttcaacaaggtcactctggccgacgctggtttcatcaagcagtacggagactgcctgggtgacatcgccgctcgcgacctgatctgcgctcagaagttcaacggcctgaccgtgctgccacctctgctgactgacgaaatgatcgcccagtacacttccgccctgctggctggaaccatcacttctggttggaccttcggtgctggtgctgctctgcagatccctttcgctatgcagatggcctacaggttcaacggaatcggtgtcacccagaacgtgctgtacgagaaccagaagctgatcgctaaccagttcaactccgccatcggcaagatccaggactccctgagctctactgccagcgctctgggaaagctgcaggacgtcgtgaaccacaacgcccaggctctgaacaccctggtcaagcagctgtcatccaagttcggagctatcagctctgtgctgaacgacatcctctcccgcctggaccctcctgaggctgaagtccagatcgacaggctgatcactggtagactgcagtctctgcagacctacgtgactcagcagctgatccgcgccgctgaaatccgtgcctcagctaacctggccgctaccaagatgtctgagtgcgtcctgggccagagcaagagggtggacttctgcggcaagggataccacctgatgtctttccctcagtcagctccccacggagtcgtgttcctgcacgtcacctacgtgccagcccaggagaagaacttcaccactgcccctgctatctgccacgacggcaaggctcacttcccccgtgaaggagtcttcgtgtccaacggcacccactggttcgtcactcagaggaacttctacgagccacagatcatcaccactgacaacactttcgtgagcggcaactgcgacgtggtcatcggtatcgtcaacaacaccgtgtacgaccccctgcagccagagctggactccttcaaggaagagctggacaagtacttcaagaaccacaccagcccagacgtcgacctgggcgacatctctggaatcaacgcttcagtcgtgaacatccagaaggagatcgaccgtctgaacgaagtggccaagaacctgaacgaatctctgatcgacctgcaggagctgggaaagtacgaacagtacatcaagtggccttggtacatctggctgggtttcatcgctggcctcatcgctatcgtgatggtgaccatcatgctgtgctgcatgacttcctgctgcagctgcctgaagggctgctgctcttgcggatcatgctgcaagttcgacgaggacgactcagaacccgtcctgaagggcgtgaagctgcactacacctaa

SEQ ID NO: 198 - DNA, 3807 bp, synthetic construct
  source 1..3807: mol_type = other DNA
atgttcgtcttcctggtgctgctgcctctggtctccagccagtgcgtgaacctgatcaccaggactcagtcctacaccaacagcttcactagaggtgtgtactaccctgacaaggtcttccgctcttcagtgctgcactctactcaggacctgttcctgcccttcttctcaaacgtcacctggttccacgccatctccggcaccaacggcactaagagattcgacaacccagtgctgcctttcaacgacggcgtctacttcgcttctaccgagaagtcaaacatcatccgcggatggatcttcggcaccactctggactccaagactcagagcctgctgatcgtcaacaacgccaccaacgtggtcatcaaggtgtgcgaattccagttctgcaacgacccattcctggacgtgtactaccacaagaacaacaagtcttggatggagtcagaattcagagtctactccagcgctaacaactgcactttcgagtacgtgtctcagcctttcctgatggacctggaaggaaagcagggtaacttcaagaacctgcgtgagttcgtcttcaagaacatcgacggttacttcaagatttactctaagcacaccccaatcaacctgggtagggacctgcctcagggcttctcagctctggagccactggtggacctgcctatcggcatcaacatcaccaggttccagactctgctggctctgcacagaagctacctgactccaggagactcatcttctggatggactgctggagctgctgcttactacgtgggttacctgcagcctcgcaccttcctgctgaagtacaacgaaaacggcaccatcactgacgccgtcgactgcgctctggaccctctgtctgaaaccaagtgcactctgaagtcattcaccgtggagaagggcatctaccagacttccaacttccgcgtgcagcccaccgaaagcatcgtccgtttccctaacatcactaacctgtgccccttcgacgaggtcttcaacgccacccgtttcgcttctgtgtacgcctggaaccgcaagcgtatctctaactgcgtcgccgactactcagtgctgtacaacttcgctcccttcttcgccttcaagtgctacggagtgtcaccaactaagctgaacgacctgtgcttcaccaacgtctacgctgactctttcgtgatcaggggtaacgaggtctcacagatcgctccaggccagactggaaacatcgccgactacaactacaagctgcctgacgacttcaccggttgcgtcatcgcttggaactccaacaagctggacagcaaagtgggtggcaactacaactaccgttacaggctgttcagaaagtccaacctgaagcccttcgagcgtgacatcagcactgaaatctaccaggctggtaacaagccatgcaacggtgtcgccggcgtcaactgctacttccccctgcagtcctacggcttccgtccaacctacggtgtgggccaccagccttacagggtggtcgtgctgtccttcgaactcctccacgctccagctactgtgtgcggaccaaagaagagcaccaacctggtcaagaacaagtgcgtgaacttcaacttcaacggtctgaccggaactggtgtcctgaccgagtctaacaagaagttcctgcccttccagcagttcggtcgtgacatcgctgacactaccgacgccgtgagggacccccagaccctggaaatcctggacatcactccatgctctttcggaggtgtctcagtgatcactccaggaaccaacacttcaaaccaggtcgctgtgctgtaccagggtgtcaactgcaccgaagtccctgtggccatccacgctgaccagctgacccccacttggagagtgtacagcaccggctctaacgtcttccagactcgcgctggttgcctgatcggcgccgagtacgtgaacaactcttacgaatgcgacatccccatcggcgctggaatctgcgcctcataccagacccagactaagtcccaccagcaggctcagagcgtcgcctcacagtccatcatcgcttacaccatgtctctgggcgctgaaaactcagtggcctactcaaacaactccatcgccatccctaccaacttcactatctccgtgaccactgagatcctgcccgtctccatgaccaagactagcgtggactgcactatgtacatctgcggagactccaccgaatgcagcaacctgctgctgcagtacggtagcttctgcacccagctgaagcgtgctctgactggcatcgccgtggagcaggacaagaacactcaggaagtcttcgctcaggtgaagcaaatctacaagacccctcccatcaagtacttcggcggattcaacttctcccagatcctgcctgaccccagcaagccatctaagagatcattcatcgaggacctgctgttcaacaaggtcactctggccgacgctggtttcatcaagcagtacggagactgcctgggtgacatcgccgctcgcgacctgatctgcgctcagaagttcaacggcctgaccgtgctgccacctctgctgactgacgaaatgatcgcccagtacacttccgccctgctggctggaaccatcacttctggttggaccttcggtgctggtgctgctctgcagatccctttcgctatgcagatggcctacaggttcaacggaatcggtgtcacccagaacgtgctgtacgagaaccagaagctgatcgctaaccagttcaactccgccatcggcaagatccaggactccctgagctctactgccagcgctctgggaaagctgcaggacgtcgtgaaccacaacgcccaggctctgaacaccctggtcaagcagctgtcatccaagttcggagctatcagctctgtgctgaacgacatcctctcccgcctggaccctcctgaggctgaagtccagatcgacaggctgatcactggtagactgcagtctctgcagacctacgtgactcagcagctgatccgcgccgctgaaatccgtgcctcagctaacctggccgctaccaagatgtctgagtgcgtcctgggccagagcaagagggtggacttctgcggcaagggataccacctgatgtctttccctcagtcagctccccacggagtcgtgttcctgcacgtcacctacgtgccagcccaggagaagaacttcaccactgcccctgctatctgccacgacggcaaggctcacttcccccgtgaaggagtcttcgtgtccaacggcacccactggttcgtcactcagaggaacttctacgagccacagatcatcaccactgacaacactttcgtgagcggcaactgcgacgtggtcatcggtatcgtcaacaacaccgtgtacgaccccctgcagccagagctggactccttcaaggaagagctggacaagtacttcaagaaccacaccagcccagacgtcgacctgggcgacatctctggaatcaacgcttcagtcgtgaacatccagaaggagatcgaccgtctgaacgaagtggccaagaacctgaacgaatctctgatcgacctgcaggagctgggaaagtacgaacagtacatcaagtggccttggtacatctggctgggtttcatcgctggcctcatcgctatcgtgatggtgaccatcatgctgtgctgcatgacttcctgctgcagctgcctgaagggctgctgctcttgcggatcatgctgcaagttcgacgaggacgactcagaacccgtcctgaagggcgtgaagctgcactacacctaa

SEQ ID NO: 199 - DNA, 3807 bp, synthetic construct
  source 1..3807: mol_type = other DNA
atgttcggtttcctggtgctgctgcctctggtctccagccagtgcgtgaacctgatcaccaggactcagtcctacaccaacagcttcactagaggtgtgtactaccctgacaaggtcttccgctcttcagtgctgcactctactcaggacctgttcctgcccttcttctcaaacgtcacctggttccacgccatctccggcaccaacggcactaagagattcgacaacccagtgctgcctttcaacgacggcgtctacttcgcttctaccgagaagtcaaacatcatccgcggatggatcttcggcaccactctggactccaagactcagagcctgctgatcgtcaacaacgccaccaacgtggtcatcaaggtgtgcgaattccagttctgcaacgacccattcctggacgtgtactaccacaagaacaacaagtcttggatggagtcagaattcagagtctactccagcgctaacaactgcactttcgagtacgtgtctcagcctttcctgatggacctggaaggaaagcagggtaacttcaagaacctgcgtgagttcgtcttcaagaacatcgacggttacttcaagatttactctaagcacaccccaatcaacctgggtagggacctgcctcagggcttctcagctctggagccactggtggacctgcctatcggcatcaacatcaccaggttccagactctgctggctctgcacagaagctacctgactccaggagactcatcttctggatggactgctggagctgctgcttactacgtgggttacctgcagcctcgcaccttcctgctgaagtacaacgaaaacggcaccatcactgacgccgtcgactgcgctctggaccctctgtctgaaaccaagtgcactctgaagtcattcaccgtggagaagggcatctaccagacttccaacttccgcgtgcagcccaccgaaagcatcgtccgtttccctaacatcactaacctgtgccccttcgacgaggtcttcaacgccacccgtttcgcttctgtgtacgcctggaaccgcaagcgtatctctaactgcgtcgccgactactcagtgctgtacaacttcgctcccttcttcgccttcaagtgctacggagtgtcaccaactaagctgaacgacctgtgcttcaccaacgtctacgctgactctttcgtgatcaggggtaacgaggtctcacagatcgctccaggccagactggaaacatcgccgactacaactacaagctgcctgacgacttcaccggttgcgtcatcgcttggaactccaacaacctggacagcaaagtgggtggcaactacaactaccgttacaggctgttcagaaagtccaacctgaagcccttcgagcgtgacatcagcactgaaatctaccaggctggtaacaagccatgcaacggtgtcgccggcgtcaactgctacttccccctgcagtcctacggcttccgtccaacctacggtgtgggccaccagccttacagggtggtcgtgctgtccttcgaactcctccacgctccagctactgtgtgcggaccaaagaagagcaccaacctggtcaagaacaagtgcgtgaacttcaacttcaacggtctgaccggaactggtgtcctgaccgagtctaacaagaagttcctgcccttccagcagttcggtcgtgacatcgctgacactaccgacgccgtgagggacccccagaccctggaaatcctggacatcactccatgctctttcggaggtgtctcagtgatcactccaggaaccaacacttcaaaccaggtcgctgtgctgtaccagggtgtcaactgcaccgaagtccctgtggccatccacgctgaccagctgacccccacttggagagtgtacagcaccgtgtctaacgtcttccagactcgcgctggttgcctgatcggcgccgagtacgtgaacaactcttacgaatgcgacatccccatcggcgctggaatctgcgcctcataccagacccagactaagtcccaccagcaggctcagagcgtcgcctcacagtccatcatcgcttacaccatgtctctgggcgctgaaaactcagtggcctactcaaacaactccatcgccatccctaccaacttcactatctccgtgaccactgagatcctgcccgtctccatgaccaagactagcgtggactgcactatgtacatctgcggagactccaccgaatgcagcaacctgctgctgcagtacggtagcttctgcacccagctgaagcgtgctctgactggcatcgccgtggagcaggacaagaacactcaggaagtcttcgctcaggtgaagcaaatctacaagacccctcccatcaagtacttcggcggattcaacttctcccagatcctgcctgaccccagcaagccatctaagagatcattcatcgaggacctgctgttcaacaaggtcactctggccgacgctggtttcatcaagcagtacggagactgcctgggtgacatcgccgctcgcgacctgatctgcgctcagaagttcaacggcctgaccgtgctgccacctctgctgactgacgaaatgatcgcccagtacacttccgccctgctggctggaaccatcacttctggttggaccttcggtgctggtgctgctctgcagatccctttcgctatgcagatggcctacaggttcaacggaatcggtgtcacccagaacgtgctgtacgagaaccagaagctgatcgctaaccagttcaactccgccatcggcaagatccaggactccctgagctctactgccagcgctctgggaaagctgcaggacgtcgtgaaccacaacgcccaggctctgaacaccctggtcaagcagctgtcatccaagttcggagctatcagctctgtgctgaacgacatcctctcccgcctggaccctcctgaggctgaagtccagatcgacaggctgatcactggtagactgcagtctctgcagacctacgtgactcagcagctgatccgcgccgctgaaatccgtgcctcagctaacctggccgctaccaagatgtctgagtgcgtcctgggccagagcaagagggtggacttctgcggcaagggataccacctgatgtctttccctcagtcagctccccacggagtcgtgttcctgcacgtcacctacgtgccagcccaggagaagaacttcaccactgcccctgctatctgccacgacggcaaggctcacttcccccgtgaaggagtcttcgtgtccaacggcacccactggttcgtcactcagaggaacttctacgagccacagatcatcaccactgacaacactttcgtgagcggcaactgcgacgtggtcatcggtatcgtcaacaacaccgtgtacgaccccctgcagccagagctggactccttcaaggaagagctggacaagtacttcaagaaccacaccagcccagacgtcgacctgggcgacatctctggaatcaacgcttcagtcgtgaacatccagaaggagatcgaccgtctgaacgaagtggccaagaacctgaacgaatctctgatcgacctgcaggagctgggaaagtacgaacagtacatcaagtggccttggtacatctggctgggtttcatcgctggcctcatcgctatcgtgatggtgaccatcatgctgtgctgcatgacttcctgctgcagctgcctgaagggctgctgctcttgcggatcatgctgcaagttcgacgaggacgactcagaacccgtcctgaagggcgtgaagctgcactacacctaa

SEQ ID NO: 200 - protein, 1270 aa, synthetic construct
MFVFLVLLPLVSSQCVNLITRTQSYTNSFTRGVYYPDKVFRSSVLHSTQDLFLPFFSNVTWFHAIHVSGTNGTKRFDNPVLPFNDGVYFASTEKSNIIRGWIFGTTLDSKTQSLLIVNNATNVVIKVCEFQFCNDPFLDVYYHKNNKSWMESEFRVYSSANNCTFEYVSQPFLMDLEGKQGNFKNLREFVFKNIDGYFKIYSKHTPINLGRDLPQGFSALEPLVDLPIGINITRFQTLLALHRSYLTPGDSSSGWTAGAAAYYVGYLQPRTFLLKYNENGTITDAVDCALDPLSETKCTLKSFTVEKGIYQTSNFRVQPTESIVRFPNITNLCPFDEVFNATRFASVYAWNRKRISNCVADYSVLYNFAPFFAFKCYGVSPTKLNDLCFTNVYADSFVIRGNEVSQIAPGQTGNIADYNYKLPDDFTGCVIAWNSNKLDSKVGGNYNYQYRLFRKSNLKPFERDISTEIYQAGNKPCNGVAGFNCYFPLRSYGFRPTYGVGHQPYRVVVLSFELLHAPATVCGPKKSTNLVKNKCVNFNFNGLTGTGVLTESNKKFLPFQQFGRDIADTTDAVRDPQTLEILDITPCSFGGVSVITPGTNTSNQVAVLYQGVNCTEVPVAIHADQLTPTWRVYSTGSNVFQTRAGCLIGAEYVNNSYECDIPIGAGICASYQTQTKSHQQAQSVASQSIIAYTMSLGAENLVAYSNNSIAIPTNFTISVTTEILPVSMTKTSVDCTMYICGDSTECSNLLLQYGSFCTQLKRALTGIAVEQDKNTQEVFAQVKQIYKTPPIKYFGGFNFSQILPDPSKPSKRSFIEDLLFNKVTLADAGFIKQYGDCLGDIAARDLICAQKFNGLTVLPPLLTDEMIAQYTSALLAGTITSGWTFGAGAALQIPFAMQMAYRFNGIGVTQNVLYENQKLIANQFNSAIGKIQDSLSSTASALGKLQDVVNHNAQALNTLVKQLSSKFGAISSVLNDILSRLDPPEAEVQIDRLITGRLQSLQTYVTQQLIRAAEIRASANLAATKMSECVLGQSKRVDFCGKGYHLMSFPQSAPHGVVFLHVTYVPAQEKNFTTAPAICHDGKAHFPREGVFVSNGTHWFVTQRNFYEPQIITTDNTFVSGNCDVVIGIVNNTVYDPLQPELDSFKEELDKYFKNHTSPDVDLGDISGINASVVNIQKEIDRLNEVAKNLNESLIDLQELGKYEQYIKWPWYIWLGFIAGLIAIVMVTIMLCCMTSCCSCLKGCCSCGSCCKFDEDDSEPVLKGVKLHYT

SEQ ID NO: 201 - DNA, 3813 bp, synthetic construct
  source 1..3813: mol_type = other DNA
atgttcgtcttcctggtgctgctgcctctggtctccagccagtgcgtgaacctgatcaccaggactcagtcctacaccaacagcttcactagaggtgtgtactaccctgacaaggtcttccgctcttcagtgctgcactctactcaggacctgttcctgcccttcttctcaaacgtcacctggttccacgccatccacgtgtccggcaccaacggcactaagagattcgacaacccagtgctgcctttcaacgacggcgtctacttcgcttctaccgagaagtcaaacatcatccgcggatggatcttcggcaccactctggactccaagactcagagcctgctgatcgtcaacaacgccaccaacgtggtcatcaaggtgtgcgaattccagttctgcaacgacccattcctggacgtgtactaccacaagaacaacaagtcttggatggagtcagaattcagagtctactccagcgctaacaactgcactttcgagtacgtgtctcagcctttcctgatggacctggaaggaaagcagggtaacttcaagaacctgcgtgagttcgtcttcaagaacatcgacggttacttcaagatttactctaagcacaccccaatcaacctgggtagggacctgcctcagggcttctcagctctggagccactggtggacctgcctatcggcatcaacatcaccaggttccagactctgctggctctgcacagaagctacctgactccaggagactcatcttctggatggactgctggagctgctgcttactacgtgggttacctgcagcctcgcaccttcctgctgaagtacaacgaaaacggcaccatcactgacgccgtcgactgcgctctggaccctctgtctgaaaccaagtgcactctgaagtcattcaccgtggagaagggcatctaccagacttccaacttccgcgtgcagcccaccgaaagcatcgtccgtttccctaacatcactaacctgtgccccttcgacgaggtcttcaacgccacccgtttcgcttctgtgtacgcctggaaccgcaagcgtatctctaactgcgtcgccgactactcagtgctgtacaacttcgctcccttcttcgccttcaagtgctacggagtgtcaccaactaagctgaacgacctgtgcttcaccaacgtctacgctgactctttcgtgatcaggggtaacgaggtctcacagatcgctccaggccagactggaaacatcgccgactacaactacaagctgcctgacgacttcaccggttgcgtcatcgcttggaactccaacaagctggacagcaaagtgggtggcaactacaactaccagtacaggctgttcagaaagtccaacctgaagcccttcgagcgtgacatcagcactgaaatctaccaggctggtaacaagccatgcaacggtgtcgccggcttcaactgctacttccccctgcgctcctacggcttccgtccaacctacggtgtgggccaccagccttacagggtggtcgtgctgtccttcgaactcctccacgctccagctactgtgtgcggaccaaagaagagcaccaacctggtcaagaacaagtgcgtgaacttcaacttcaacggtctgaccggaactggtgtcctgaccgagtctaacaagaagttcctgcccttccagcagttcggtcgtgacatcgctgacactaccgacgccgtgagggacccccagaccctggaaatcctggacatcactccatgctctttcggaggtgtctcagtgatcactccaggaaccaacacttcaaaccaggtcgctgtgctgtaccagggtgtcaactgcaccgaagtccctgtggccatccacgctgaccagctgacccccacttggagagtgtacagcaccggctctaacgtcttccagactcgcgctggttgcctgatcggcgccgagtacgtgaacaactcttacgaatgcgacatccccatcggcgctggaatctgcgcctcataccagacccagactaagtcccaccagcaggctcagagcgtcgcctcacagtccatcatcgcttacaccatgtctctgggcgctgaaaacctggtggcctactcaaacaactccatcgccatccctaccaacttcactatctccgtgaccactgagatcctgcccgtctccatgaccaagactagcgtggactgcactatgtacatctgcggagactccaccgaatgcagcaacctgctgctgcagtacggtagcttctgcacccagctgaagcgtgctctgactggcatcgccgtggagcaggacaagaacactcaggaagtcttcgctcaggtgaagcaaatctacaagacccctcccatcaagtacttcggcggattcaacttctcccagatcctgcctgaccccagcaagccatctaagagatcattcatcgaggacctgctgttcaacaaggtcactctggccgacgctggtttcatcaagcagtacggagactgcctgggtgacatcgccgctcgcgacctgatctgcgctcagaagttcaacggcctgaccgtgctgccacctctgctgactgacgaaatgatcgcccagtacacttccgccctgctggctggaaccatcacttctggttggaccttcggtgctggtgctgctctgcagatccctttcgctatgcagatggcctacaggttcaacggaatcggtgtcacccagaacgtgctgtacgagaaccagaagctgatcgctaaccagttcaactccgccatcggcaagatccaggactccctgagctctactgccagcgctctgggaaagctgcaggacgtcgtgaaccacaacgcccaggctctgaacaccctggtcaagcagctgtcatccaagttcggagctatcagctctgtgctgaacgacatcctctcccgcctggaccctcctgaggctgaagtccagatcgacaggctgatcactggtagactgcagtctctgcagacctacgtgactcagcagctgatccgcgccgctgaaatccgtgcctcagctaacctggccgctaccaagatgtctgagtgcgtcctgggccagagcaagagggtggacttctgcggcaagggataccacctgatgtctttccctcagtcagctccccacggagtcgtgttcctgcacgtcacctacgtgccagcccaggagaagaacttcaccactgcccctgctatctgccacgacggcaaggctcacttcccccgtgaaggagtcttcgtgtccaacggcacccactggttcgtcactcagaggaacttctacgagccacagatcatcaccactgacaacactttcgtgagcggcaactgcgacgtggtcatcggtatcgtcaacaacaccgtgtacgaccccctgcagccagagctggactccttcaaggaagagctggacaagtacttcaagaaccacaccagcccagacgtcgacctgggcgacatctctggaatcaacgcttcagtcgtgaacatccagaaggagatcgaccgtctgaacgaagtggccaagaacctgaacgaatctctgatcgacctgcaggagctgggaaagtacgaacagtacatcaagtggccttggtacatctggctgggtttcatcgctggcctcatcgctatcgtgatggtgaccatcatgctgtgctgcatgacttcctgctgcagctgcctgaagggctgctgctcttgcggatcatgctgcaagttcgacgaggacgactcagaacccgtcctgaagggcgtgaagctgcactacacctaa

SEQ ID NO: 202 - DNA, 3813 bp, synthetic construct
  source 1..3813: mol_type = other DNA
atgttcgtcttcctggtgctgctgcctctggtctccagccagtgcgtgaacctgatcaccaggactcagtcctacaccaacagcttcactagaggtgtgtactaccctgacaaggtcttccgctcttcagtgctgcactctactcaggacctgttcctgcccttcttctcaaacgtcacctggttccacgccatccacgtgtccggcaccaacggcactaagagattcgacaacccagtgctgcctttcaacgacggcgtctacttcgcttctaccgagaagtcaaacatcatccgcggatggatcttcggcaccactctggactccaagactcagagcctgctgatcgtcaacaacgccaccaacgtggtcatcaaggtgtgcgaattccagttctgcaacgacccattcctggacgtgtactaccacaagaacaacaagtcttggatggagtcagaattcagagtctactccagcgctaacaactgcactttcgagtacgtgtctcagcctttcctgatggacctggaaggaaagcagggtaacttcaagaacctgcgtgagttcgtcttcaagaacatcgacggttacttcaagatttactctaagcacaccccaatcaacctgggtagggacctgcctcagggcttctcagctctggagccactggtggacctgcctatcggcatcaacatcaccaggttccagactctgctggctctgcacagaagctacctgactccaggagactcatcttctggatggactgctggagctgctgcttactacgtgggttacctgcagcctcgcaccttcctgctgaagtacaacgaaaacggcaccatcactgacgccgtcgactgcgctctggaccctctgtctgaaaccaagtgcactctgaagtcattcaccgtggagaagggcatctaccagacttccaacttccgcgtgcagcccaccgaaagcatcgtccgtttccctaacatcactaacctgtgccccttcgacgaggtcttcaacgccacccgtttcgcttctgtgtacgcctggaaccgcaagcgtatctctaactgcgtcgccgactactcagtgctgtacaacttcgctcccttcttcgccttcaagtgctacggagtgtcaccaactaagctgaacgacctgtgcttcaccaacgtctacgctgactctttcgtgatcaggggtaacgaggtccgtcagatcgctccaggccagactggaaacatcgccgactacaactacaagctgcctgacgacttcaccggttgcgtcatcgcttggaactccaacaagctggacagcaaagtgggtggcaactacaactaccagtacaggctgttcagaaagtccaacctgaagcccttcgagcgtgacatcagcactgaaatctaccaggctggtaacaagccatgcaacggtgtcgccggcttcaactgctacttccccctgcgctcctacggcttccgtccaacctacggtgtgggccaccagccttacagggtggtcgtgctgtccttcgaactcctccacgctccagctactgtgtgcggaccaaagaagagcaccaacctggtcaagaacaagtgcgtgaacttcaacttcaacggtctgaccggaactggtgtcctgaccgagtctaacaagaagttcctgcccttccagcagttcggtcgtgacatcgctgacactaccgacgccgtgagggacccccagaccctggaaatcctggacatcactccatgctctttcggaggtgtctcagtgatcactccaggaaccaacacttcaaaccaggtcgctgtgctgtaccagggtgtcaactgcaccgaagtccctgtggccatccacgctgaccagctgacccccacttggagagtgtacagcaccggctctaacgtcttccagactcgcgctggttgcctgatcggcgccgagtacgtgaacaactcttacgaatgcgacatccccatcggcgctggaatctgcgcctcataccagacccagactaagtcccaccagcaggctcagagcgtcgcctcacagtccatcatcgcttacaccatgtctctgggcgctgaaaacctggtggcctactcaaacaactccatcgccatccctaccaacttcactatctccgtgaccactgagatcctgcccgtctccatgaccaagactagcgtggactgcactatgtacatctgcggagactccaccgaatgcagcaacctgctgctgcagtacggtagcttctgcacccagctgaagcgtgctctgactggcatcgccgtggagcaggacaagaacactcaggaagtcttcgctcaggtgaagcaaatctacaagacccctcccatcaagtacttcggcggattcaacttctcccagatcctgcctgaccccagcaagccatctaagagatcattcatcgaggacctgctgttcaacaaggtcactctggccgacgctggtttcatcaagcagtacggagactgcctgggtgacatcgccgctcgcgacctgatctgcgctcagaagttcaacggcctgaccgtgctgccacctctgctgactgacgaaatgatcgcccagtacacttccgccctgctggctggaaccatcacttctggttggaccttcggtgctggtgctgctctgcagatccctttcgctatgcagatggcctacaggttcaacggaatcggtgtcacccagaacgtgctgtacgagaaccagaagctgatcgctaaccagttcaactccgccatcggcaagatccaggactccctgagctctactgccagcgctctgggaaagctgcaggacgtcgtgaaccacaacgcccaggctctgaacaccctggtcaagcagctgtcatccaagttcggagctatcagctctgtgctgaacgacatcctctcccgcctggaccctcctgaggctgaagtccagatcgacaggctgatcactggtagactgcagtctctgcagacctacgtgactcagcagctgatccgcgccgctgaaatccgtgcctcagctaacctggccgctaccaagatgtctgagtgcgtcctgggccagagcaagagggtggacttctgcggcaagggataccacctgatgtctttccctcagtcagctccccacggagtcgtgttcctgcacgtcacctacgtgccagcccaggagaagaacttcaccactgcccctgctatctgccacgacggcaaggctcacttcccccgtgaaggagtcttcgtgtccaacggcacccactggttcgtcactcagaggaacttctacgagccacagatcatcaccactgacaacactttcgtgagcggcaactgcgacgtggtcatcggtatcgtcaacaacaccgtgtacgaccccctgcagccagagctggactccttcaaggaagagctggacaagtacttcaagaaccacaccagcccagacgtcgacctgggcgacatctctggaatcaacgcttcagtcgtgaacatccagaaggagatcgaccgtctgaacgaagtggccaagaacctgaacgaatctctgatcgacctgcaggagctgggaaagtacgaacagtacatcaagtggccttggtacatctggctgggtttcatcgctggcctcatcgctatcgtgatggtgaccatcatgctgtgctgcatgacttcctgctgcagctgcctgaagggctgctgctcttgcggatcatgctgcaagttcgacgaggacgactcagaacccgtcctgaagggcgtgaagctgcactacacctaa

SEQ ID NO: 203 - protein, 1268 aa, synthetic construct
MFVFLVLLPLVSSQCVNLITRTQSYTNSFTRGVYYPDKVFRSSVLHSTQDLFLPFFSNVTWFHAISGTNGTKRFDNPVLPFNDGVYFASTEKSNIIRGWIFGTTLDSKTQSLLIVNNATNVVIKVCEFQFCNDPFLDVYYHKNNKSWMESEFRVYSSANNCTFEYVSQPFLMDLEGKQGNFKNLREFVFKNIDGYFKIYSKHTPINLGRDLPQGFSALEPLVDLPIGINITRFQTLLALHRSYLTPGDSSSGWTAGAAAYYVGYLQPRTFLLKYNENGTITDAVDCALDPLSETKCTLKSFTVEKGIYQTSNFRVQPTESIVRFPNITNLCPFDEVFNATTFASVYAWNRKRISNCVADYSVLYNFAPFFAFKCYGVSPTKLNDLCFTNVYADSFVIRGNEVSQIAPGQTGNIADYNYKLPDDFTGCVIAWNSNKLDSKVGGNYNYRYRLFRKSNLKPFERDISTEIYQAGNKPCNGVAGVNCYFPLQSYGFRPTYGVGHQPYRVVVLSFELLHAPATVCGPKKSTNLVKNKCVNFNFNGLTGTGVLTESNKKFLPFQQFGRDIADTTDAVRDPQTLEILDITPCSFGGVSVITPGTNTSNQVAVLYQGVNCTEVPVAIHADQLTPTWRVYSTGSNVFQTRAGCLIGAEYVNSSYECDIPIGAGICASYQTQTKSHQQAQSVASQSIIAYTMSLGAENSVAYSNNSIAIPTNFTISVTTEILPVSMTKTSVDCTMYICGDSTECSNLLLQYGSFCTQLKRALTGIAVEQDKNTQEVFAQVKQIYKTPPIKYFGGFNFSQILPDPSKPSKRSFIEDLLFNKVTLADAGFIKQYGDCLGDIAARDLICAQKFNGLTVLPPLLTDEMIAQYTSALLAGTITSGWTFGAGAALQIPFAMQMAYRFNGIGVTQNVLYENQKLIANQFNSAIGKIQDSLSSTASALGKLQDVVNHNAQALNTLVKQLSSKFGAISSVLNDILSRLDPPEAEVQIDRLITGRLQSLQTYVTQQLIRAAEIRASANLAATKMSECVLGQSKRVDFCGKGYHLMSFPQSAPHGVVFLHVTYVPAQEKNFTTAPAICHDGKAHFPREGVFVSNGTHWFVTQRNFYEPQIITTDNTFVSGNCDVVIGIVNNTVYDPLQPELDSFKEELDKYFKNHTSPDVDLGDISGINASVVNIQKEIDRLNEVAKNLNESLIDLQELGKYEQYIKWPWYIWLGFIAGLIAIVMVTIMLCCMTSCCSCLKGCCSCGSCCKFDEDDSEPVLKGVKLHYT

SEQ ID NO: 204 - DNA, 3807 bp, synthetic construct
  source 1..3807: mol_type = other DNA
atgttcgtcttcctggtgctgctgcctctggtctccagccagtgcgtgaacctgatcaccaggactcagtcctacaccaacagcttcactagaggtgtgtactaccctgacaaggtcttccgctcttcagtgctgcactctactcaggacctgttcctgcccttcttctcaaacgtcacctggttccacgccatctccggcaccaacggcactaagagattcgacaacccagtgctgcctttcaacgacggcgtctacttcgcttctaccgagaagtcaaacatcatccgcggatggatcttcggcaccactctggactccaagactcagagcctgctgatcgtcaacaacgccaccaacgtggtcatcaaggtgtgcgaattccagttctgcaacgacccattcctggacgtgtactaccacaagaacaacaagtcttggatggagtcagaattcagagtctactccagcgctaacaactgcactttcgagtacgtgtctcagcctttcctgatggacctggaaggaaagcagggtaacttcaagaacctgcgtgagttcgtcttcaagaacatcgacggttacttcaagatttactctaagcacaccccaatcaacctgggtagggacctgcctcagggcttctcagctctggagccactggtggacctgcctatcggcatcaacatcaccaggttccagactctgctggctctgcacagaagctacctgactccaggagactcatcttctggatggactgctggagctgctgcttactacgtgggttacctgcagcctcgcaccttcctgctgaagtacaacgaaaacggcaccatcactgacgccgtcgactgcgctctggaccctctgtctgaaaccaagtgcactctgaagtcattcaccgtggagaagggcatctaccagacttccaacttccgcgtgcagcccaccgaaagcatcgtccgtttccctaacatcactaacctgtgccccttcgacgaggtcttcaacgccaccaccttcgcttctgtgtacgcctggaaccgcaagcgtatctctaactgcgtcgccgactactcagtgctgtacaacttcgctcccttcttcgccttcaagtgctacggagtgtcaccaactaagctgaacgacctgtgcttcaccaacgtctacgctgactctttcgtgatcaggggtaacgaggtctcacagatcgctccaggccagactggaaacatcgccgactacaactacaagctgcctgacgacttcaccggttgcgtcatcgcttggaactccaacaagctggacagcaaagtgggtggcaactacaactaccgttacaggctgttcagaaagtccaacctgaagcccttcgagcgtgacatcagcactgaaatctaccaggctggtaacaagccatgcaacggtgtcgccggcgtcaactgctacttccccctgcagtcctacggcttccgtccaacctacggtgtgggccaccagccttacagggtggtcgtgctgtccttcgaactcctccacgctccagctactgtgtgcggaccaaagaagagcaccaacctggtcaagaacaagtgcgtgaacttcaacttcaacggtctgaccggaactggtgtcctgaccgagtctaacaagaagttcctgcccttccagcagttcggtcgtgacatcgctgacactaccgacgccgtgagggacccccagaccctggaaatcctggacatcactccatgctctttcggaggtgtctcagtgatcactccaggaaccaacacttcaaaccaggtcgctgtgctgtaccagggtgtcaactgcaccgaagtccctgtggccatccacgctgaccagctgacccccacttggagagtgtacagcaccggctctaacgtcttccagactcgcgctggttgcctgatcggcgccgagtacgtgaactcctcttacgaatgcgacatccccatcggcgctggaatctgcgcctcataccagacccagactaagtcccaccagcaggctcagagcgtcgcctcacagtccatcatcgcttacaccatgtctctgggcgctgaaaactcagtggcctactcaaacaactccatcgccatccctaccaacttcactatctccgtgaccactgagatcctgcccgtctccatgaccaagactagcgtggactgcactatgtacatctgcggagactccaccgaatgcagcaacctgctgctgcagtacggtagcttctgcacccagctgaagcgtgctctgactggcatcgccgtggagcaggacaagaacactcaggaagtcttcgctcaggtgaagcaaatctacaagacccctcccatcaagtacttcggcggattcaacttctcccagatcctgcctgaccccagcaagccatctaagagatcattcatcgaggacctgctgttcaacaaggtcactctggccgacgctggtttcatcaagcagtacggagactgcctgggtgacatcgccgctcgcgacctgatctgcgctcagaagttcaacggcctgaccgtgctgccacctctgctgactgacgaaatgatcgcccagtacacttccgccctgctggctggaaccatcacttctggttggaccttcggtgctggtgctgctctgcagatccctttcgctatgcagatggcctacaggttcaacggaatcggtgtcacccagaacgtgctgtacgagaaccagaagctgatcgctaaccagttcaactccgccatcggcaagatccaggactccctgagctctactgccagcgctctgggaaagctgcaggacgtcgtgaaccacaacgcccaggctctgaacaccctggtcaagcagctgtcatccaagttcggagctatcagctctgtgctgaacgacatcctctcccgcctggaccctcctgaggctgaagtccagatcgacaggctgatcactggtagactgcagtctctgcagacctacgtgactcagcagctgatccgcgccgctgaaatccgtgcctcagctaacctggccgctaccaagatgtctgagtgcgtcctgggccagagcaagagggtggacttctgcggcaagggataccacctgatgtctttccctcagtcagctccccacggagtcgtgttcctgcacgtcacctacgtgccagcccaggagaagaacttcaccactgcccctgctatctgccacgacggcaaggctcacttcccccgtgaaggagtcttcgtgtccaacggcacccactggttcgtcactcagaggaacttctacgagccacagatcatcaccactgacaacactttcgtgagcggcaactgcgacgtggtcatcggtatcgtcaacaacaccgtgtacgaccccctgcagccagagctggactccttcaaggaagagctggacaagtacttcaagaaccacaccagcccagacgtcgacctgggcgacatctctggaatcaacgcttcagtcgtgaacatccagaaggagatcgaccgtctgaacgaagtggccaagaacctgaacgaatctctgatcgacctgcaggagctgggaaagtacgaacagtacatcaagtggccttggtacatctggctgggtttcatcgctggcctcatcgctatcgtgatggtgaccatcatgctgtgctgcatgacttcctgctgcagctgcctgaagggctgctgctcttgcggatcatgctgcaagttcgacgaggacgactcagaacccgtcctgaagggcgtgaagctgcactacacctaa

SEQ ID NO: 205 - protein, 1270 aa, synthetic construct
MFVFLVLLPLVSSQCVNLITRTQSYTNSFTRGVYYPDKVFRSSVLHSTQDLFLPFFSNVTWFHAIHVSGTNGTKRFDNPVLPFNDGVYFASTEKSNIIRGWIFGTTLDSKTQSLLIVNNATNVVIKVCEFQFCNDPFLDVYYHENNKSRMESELRVYSSANNCTFEYVSQPFLMDLEGKQGNFKNLREFVFKNIDGYFKIYSKHTPVNLGRDLPQGFSALEPLVDLPIGINITRFQTLLALHRSYLTPGDSSSSWTAGAAAYYVGYLQPRTFLLKYNENGTITDAVDCALDPLSETKCTLKSFTVEKGIYQTSNFRVQPTESIVRFPNITNLCPFHEVFNATRFASVYAWNRKRISNCVADYSVLYNFAPFFAFKCYGVSPTKLNDLCFTNVYADSFVIRGNEVSQIAPGQTGNIADYNYKLPDDFTGCVIAWNSNKLDSKVSGNYNYLYRLFRKSKLKPFERDISTEIYQAGNKPCNGVAGFNCYFPLQSYGFRPTYGVGHQPYRVVVLSFELLHAPATVCGPKKSTNLVKNKCVNFNFNGLTGTGVLTESNKKFLPFQQFGRDIADTTDAVRDPQTLEILDITPCSFGGVSVITPGTNTSNQVAVLYQGVNCTEVPVAIHADQLTPTWRVYSTGSNVFQTRAGCLIGAEYVNNSYECDIPIGAGICASYQTQTKSHQQAQSVASQSIIAYTMSLGAENSVAYSNNSIAIPTNFTISVTTEILPVSMTKTSVDCTMYICGDSTECSNLLLQYGSFCTQLKRALTGIAVEQDKNTQEVFAQVKQIYKTPPIKYFGGFNFSQILPDPSKPSKRSFIEDLLFNKVTLADAGFIKQYGDCLGDIAARDLICAQKFNGLTVLPPLLTDEMIAQYTSALLAGTITSGWTFGAGAALQIPFAMQMAYRFNGIGVTQNVLYENQKLIANQFNSAIGKIQDSLSSTASALGKLQDVVNHNAQALNTLVKQLSSKFGAISSVLNDILSRLDPPEAEVQIDRLITGRLQSLQTYVTQQLIRAAEIRASANLAATKMSECVLGQSKRVDFCGKGYHLMSFPQSAPHGVVFLHVTYVPAQEKNFTTAPAICHDGKAHFPREGVFVSNGTHWFVTQRNFYEPQIITTDNTFVSGNCDVVIGIVNNTVYDPLQPELDSFKEELDKYFKNHTSPDVDLGDISGINASVVNIQKEIDRLNEVAKNLNESLIDLQELGKYEQYIKWPWYIWLGFIAGLIAIVMVTIMLCCMTSCCSCLKGCCSCGSCCKFDEDDSEPVLKGVKLHYT

SEQ ID NO: 206 - DNA, 3813 bp, synthetic construct
  source 1..3813: mol_type = other DNA
atgttcgtcttcctggtgctgctgcctctggtctccagccagtgcgtgaacctgatcaccaggactcagtcctacaccaacagcttcactagaggtgtgtactaccctgacaaggtcttccgctcttcagtgctgcactctactcaggacctgttcctgcccttcttctcaaacgtcacctggttccacgccatccacgtgtccggcaccaacggcactaagagattcgacaacccagtgctgcctttcaacgacggcgtctacttcgcttctaccgagaagtcaaacatcatccgcggatggatcttcggcaccactctggactccaagactcagagcctgctgatcgtcaacaacgccaccaacgtggtcatcaaggtgtgcgaattccagttctgcaacgacccattcctggacgtgtactaccacgagaacaacaagtctcgcatggagtcagaattgagagtctactccagcgctaacaactgcactttcgagtacgtgtctcagcctttcctgatggacctggaaggaaagcagggtaacttcaagaacctgcgtgagttcgtcttcaagaacatcgacggttacttcaagatttactctaagcacaccccagtgaacctgggtagggacctgcctcagggcttctcagctctggagccactggtggacctgcctatcggcatcaacatcaccaggttccagactctgctggctctgcacagaagctacctgactccaggagactcatcttctagctggactgctggagctgctgcttactacgtgggttacctgcagcctcgcaccttcctgctgaagtacaacgaaaacggcaccatcactgacgccgtcgactgcgctctggaccctctgtctgaaaccaagtgcactctgaagtcattcaccgtggagaagggcatctaccagacttccaacttccgcgtgcagcccaccgaaagcatcgtccgtttccctaacatcactaacctgtgccccttccacgaggtcttcaacgccacccgtttcgcttctgtgtacgcctggaaccgcaagcgtatctctaactgcgtcgccgactactcagtgctgtacaacttcgctcccttcttcgccttcaagtgctacggagtgtcaccaactaagctgaacgacctgtgcttcaccaacgtctacgctgactctttcgtgatcaggggtaacgaggtctcacagatcgctccaggccagactggaaacatcgccgactacaactacaagctgcctgacgacttcaccggttgcgtcatcgcttggaactccaacaagctggacagcaaagtgagcggcaactacaactacttgtacaggctgttcagaaagtccaaactgaagcccttcgagcgtgacatcagcactgaaatctaccaggctggtaacaagccatgcaacggtgtcgccggctttaactgctacttccccctgcagtcctacggcttccgtccaacctacggtgtgggccaccagccttacagggtggtcgtgctgtccttcgaactcctccacgctccagctactgtgtgcggaccaaagaagagcaccaacctggtcaagaacaagtgcgtgaacttcaacttcaacggtctgaccggaactggtgtcctgaccgagtctaacaagaagttcctgcccttccagcagttcggtcgtgacatcgctgacactaccgacgccgtgagggacccccagaccctggaaatcctggacatcactccatgctctttcggaggtgtctcagtgatcactccaggaaccaacacttcaaaccaggtcgctgtgctgtaccagggtgtcaactgcaccgaagtccctgtggccatccacgctgaccagctgacccccacttggagagtgtacagcaccggctctaacgtcttccagactcgcgctggttgcctgatcggcgccgagtacgtgaacaactcttacgaatgcgacatccccatcggcgctggaatctgcgcctcataccagacccagactaagtcccaccagcaggctcagagcgtcgcctcacagtccatcatcgcttacaccatgtctctgggcgctgaaaactcagtggcctactcaaacaactccatcgccatccctaccaacttcactatctccgtgaccactgagatcctgcccgtctccatgaccaagactagcgtggactgcactatgtacatctgcggagactccaccgaatgcagcaacctgctgctgcagtacggtagcttctgcacccagctgaagcgtgctctgactggcatcgccgtggagcaggacaagaacactcaggaagtcttcgctcaggtgaagcaaatctacaagacccctcccatcaagtacttcggcggattcaacttctcccagatcctgcctgaccccagcaagccatctaagagatcattcatcgaggacctgctgttcaacaaggtcactctggccgacgctggtttcatcaagcagtacggagactgcctgggtgacatcgccgctcgcgacctgatctgcgctcagaagttcaacggcctgaccgtgctgccacctctgctgactgacgaaatgatcgcccagtacacttccgccctgctggctggaaccatcacttctggttggaccttcggtgctggtgctgctctgcagatccctttcgctatgcagatggcctacaggttcaacggaatcggtgtcacccagaacgtgctgtacgagaaccagaagctgatcgctaaccagttcaactccgccatcggcaagatccaggactccctgagctctactgccagcgctctgggaaagctgcaggacgtcgtgaaccacaacgcccaggctctgaacaccctggtcaagcagctgtcatccaagttcggagctatcagctctgtgctgaacgacatcctctcccgcctggaccctcctgaggctgaagtccagatcgacaggctgatcactggtagactgcagtctctgcagacctacgtgactcagcagctgatccgcgccgctgaaatccgtgcctcagctaacctggccgctaccaagatgtctgagtgcgtcctgggccagagcaagagggtggacttctgcggcaagggataccacctgatgtctttccctcagtcagctccccacggagtcgtgttcctgcacgtcacctacgtgccagcccaggagaagaacttcaccactgcccctgctatctgccacgacggcaaggctcacttcccccgtgaaggagtcttcgtgtccaacggcacccactggttcgtcactcagaggaacttctacgagccacagatcatcaccactgacaacactttcgtgagcggcaactgcgacgtggtcatcggtatcgtcaacaacaccgtgtacgaccccctgcagccagagctggactccttcaaggaagagctggacaagtacttcaagaaccacaccagcccagacgtcgacctgggcgacatctctggaatcaacgcttcagtcgtgaacatccagaaggagatcgaccgtctgaacgaagtggccaagaacctgaacgaatctctgatcgacctgcaggagctgggaaagtacgaacagtacatcaagtggccttggtacatctggctgggtttcatcgctggcctcatcgctatcgtgatggtgaccatcatgctgtgctgcatgacttcctgctgcagctgcctgaagggctgctgctcttgcggatcatgctgcaagttcgacgaggacgactcagaacccgtcctgaagggcgtgaagctgcactacacctaa

SEQ ID NO: 207 - protein, 1270 aa, synthetic construct; identical to SEQ ID NO: 160

SEQ ID NO: 208 - DNA, 3810 bp, synthetic construct
  source 1..3810: mol_type = other DNA
atgttcgtcttcctggtgctgctgcccctggtgtccagccagtgcgtgaacctgaccactaggactcagctgcctcccgcttacaccaactcattcactcgcggtgtgtactaccctgacaaggtcttccgttcttcagtgctgcactcaactcaggacctgttcctgcccttcttctccaacgtcacctggttccacgtcatctccggcaccaacggcactaagcgcttcgacaacccagtgctgcctttcaacgacggtgtctacttcgcttcaattgagaagtccaacatcatccgtggatggatcttcggcaccactctggacagcaagactcagtctctgctgatcgtcaacaacgccaccaacgtggtcatcaaggtctgcgaattccagttctgcaacgacccattcctggaccacaagaacaacaagtcatggatggagtccgaattccgcgtctactccagcgctaacaactgcactttcgagtacgtgtcccagcctttcctgatggacctggaaggaaagcagggtaacttcaagaacctgagggagttcgtgttcaagaacatcgacggatacttcaagatttacagcaagcacaccccaatcattgtgcgcgagccggaggacctgcctcagggtttctctgctctggagccactggtggacctgcctatcggcatcaacatcacccgcttccagactctgctggctctgcaccgttcctacctgactccaggcgactcatcttctggatggactgctggagctgctgcttactacgtgggctacctgcagcctcgcaccttcctgctgaagtacaacgaaaacggaaccatcactgacgccgtcgactgcgctctggaccctctgtcagaaaccaagtgcactctgaagtccttcaccgtggagaagggcatctaccagacttcaaacttcagggtgcagcccaccgaatccatcgtcagattccctaacatcactaacctgtgccccttcgacgaggtcttcaacgccacccgcttcgcttccgtgtacgcctggaacaggaagagaatctcaaactgcgtcgctgactactccgtgctgtacaaccttgccccgttctttaccttcaagtgctacggcgtgtcaccaactaagctgaacgacctgtgcttcaccaacgtctacgccgactccttcgtgatcaggggagacgaggtcagacagatcgctcctggccagactggaaatatcgccgactacaactacaagctgcccgacgacttcaccggttgcgtcatcgcttggaacagcaacaaactggactctaaagtgagtggcaactacaactacctgtaccgcctgttccgtaagtcaaacctgaagccattcgagagggacatcagcactgaaatctaccaggccggaaataaaccttgcaacggtgtcgcgggcttcaactgctacttccccctgaggtcctactctttccgaccaacttatggtgtgggccaccagccttacagagtggtcgtgctgagcttcgaactgctccacgctcctgctactgtgtgcggtccaaagaagtctaccaacctggtcaagaacaagtgcgtgaacttcaacttcaacggcctgaaaggaactggtgtcctgaccgagagcaacaagaagttcctgcccttccagcagttcggaagggacatcgctgacaccactgacgctgtgcgcgaccctcagaccctggaaatcctggacatcactccatgctcattcggaggtgtctccgtgatcacccctggcaccaacacttctaaccaggtcgctgtgctgtaccagggcgtcaactgcaccgaggtccctgtggccatccacgctgaccagctgacccccacttggcgcgtgtactccaccggcagcaacgtgttccagactcgtgctggttgcctgatcggcgccgagtacgtgaacaacagctacgaatgcgacatccccatcggcgctggaatctgcgcctcttaccagacccagactaagagccaccagcaggctcagtctgtggcctctcagtcaatcatcgcttacaccatgtcactgggcgctgaaaactccgtggcctactctaacaactcaatcgccatccccaccaacttcactatcagcgtgaccactgagatcctgccagtcagcatgaccaagacttctgtggactgcactatgtacatctgcggagacagcaccgaatgctctaacctgctgctgcagtacggctctttctgcacccagctgaagcgtgctctgactggaatcgccgtggagcaggacaagaacactcaggaagtcttcgctcaggtgaagcaaatctacaagaccccacctatcaagtacttcggcggattcaacttctcccagatcctgcctgacccctccaagccaagcaagcgctctttcatcgaggacctgctgttcaacaaggtcactctggccgacgctggattcatcaagcagtacggagactgcctgggtgacatcgccgctcgtgacctgatctgcgctcagaagttcaagggtctgaccgtgctgcccccactgctgactgacgaaatgatcgcccagtacactagcgccctgctggctggaaccatcacttctggttggaccttcggtgctggcgccgctctgcagatccctttcgctatgcagatggcctaccgtttcaacggaatcggtgtcacccagaacgtgctgtacgagaaccagaagctgatcgctaaccagttcaactcagccatcggaaagatccaggacagcctgagctctactgcctctgctctgggcaagctgcaggacgtcgtgaaccataacgcccaggctctgaacaccctggtcaagcagctgtcatccaagttcggtgctatcagctctgtgctgaacgacatcttctcccgcctggaccctcccgaggccgaagtgcagatcgaccgcctgatcactggccgtctgcagtcactgcagacctacgtgactcagcagctgatcagggccgctgaaatcagagcctccgctaacctggccgctaccaagatgagcgagtgcgtcctgggtcaatctaagcgtgtggacttctgcggcaagggataccacctgatgtcattccctcagtctgctccccacggtgtggtgttcctgcacgtcacctacgtgccagcccaggagaagaacttcaccactgcccctgctatctgccacgacggcaaggctcacttccccagggaaggtgtcttcgtgagcaacggcacccactggttcgtcactcagagaaacttctacgagccacagatcatcaccactgacaacactttcgtgtctggaaactgcgacgtggtcatcggtatcgtcaacaacaccgtgtacgaccccctgcagccagagctggactcattcaaggaggaactggacaagtacttcaagaaccacacctcccctgacgtcgacctgggcgacatctcaggaatcaacgcttccgtcgtgaacatccagaaggagatcgaccgcctgaacgaagtggccaagaacctgaacgaaagcctgatcgacctgcaggagctgggcaagtacgaacagtacatcaagtggccttggtacatctggctgggtttcatcgctggcctcatcgctatcgtgatggtgaccatcatgctgtgctgcatgacttcatgctgctcctgcctgaagggctgctgcagctgcggatcttgctgcaagttcgacgaggacgactctgaacccgtcctgaagggcgtgaagctgcactacacc

SEQ ID NO: 209 - protein, 1270 aa, synthetic construct
MFVFLVLLPLVSSQCVNLITRTQSYTNSFTRGVYYPDKVFRSSVLHSTQDLFLPFFSNVTWFHAIHVSGTNGTKRFDNPVLPFNDGVYFASTEKSNIIRGWIFGTTLDSKTQSLLIVNNATNVVIKVCEFQFCNDPFLDVYYHENNKSRMESELRVYSSANNCTFEYVSQPFLMDLEGKQGNFKNLREFVFKNIDGYFKIYSKHTPVNLGRDLPQGFSALEPLVDLPIGINITRFQTLLALHRSYLTPGDSSSSWTAGAAAYYVGYLQPRTFLLKYNENGTITDAVDCALDPLSETKCTLKSFTVEKGIYQTSNFRVQPTESIVRFPNITNLCPFHEVFNATTFASVYAWNRKRISNCVADYSVLYNFAPFFAFKCYGVSPTKLNDLCFTNVYADSFVIRGNEVSQIAPGQTGNIADYNYKLPDDFTGCVIAWNSNKLDSKVSGNYNYRYRLFRKSKLKPFERDISTEIYQAGNKPCNGVAGSNCYFPLQSYGFRPTYGVGHQPYRVVVLSFELLHAPATVCGPKKSTNLVKNKCVNFNFNGLTGTGVLTESNKKFLPFQQFGRDIADTTDAVRDPQTLEILDITPCSFGGVSVITPGTNISNQVAVLYQGVNCTEVPVAIHADQLTPTWRVYSTGSNVFQTRAGCLIGAEYVNNSYECDIPIGAGICASYQTQTKSHQQAQSVASQSIIAYTMSLGAENSVAYSNNSIAIPTNFTISVTTEILPVSMTKTSVDCTMYICGDSTECSNLLLQYGSFCTQLKRALTGIAVEQDKNTQEVFAQVKQIYKTPPIKYFGGFNFSQILPDPSKPSKRSFIEDLLFNKVTLADAGFIKQYGDCLGDIAARDLICAQKFNGLTVLPPLLTDEMIAQYTSALLAGTITSGWTFGAGAALQIPFAMQMAYRFNGIGVTQNVLYENQKLIANQFNSAIGKIQDSLSSTASALGKLQDVVNHNAQALNTLVKQLSSKFGAISSVLNDILSRLDPPEAEVQIDRLITGRLQSLQTYVTQQLIRAAEIRASANLAATKMSECVLGQSKRVDFCGKGYHLMSFPQSAPHGVVFLHVTYVPAQEKNFTTAPAICHDGKAHFPREGVFVSNGTHWFVTQRNFYEPQIITTDNTFVSGNCDVVIGIVNNTVYDPLQPELDSFKEELDKYFKNHTSPDVDLGDISGINASVVNIQKEIDRLNEVAKNLNESLINLQELGKYEQYIKWPWYIWLGFIAGLIAIVMVTIMLCCMTSCCSCLKGCCSCGSCCKFDEDDSEPVLKGVKLHYT

SEQ ID NO: 210 - DNA, 3813 bp, synthetic construct
  source 1..3813: mol_type = other DNA
atgttcgtcttcctggtgctgctgcctctggtctccagccagtgcgtgaacctgatcaccaggactcagtcctacaccaacagcttcactagaggtgtgtactaccctgacaaggtcttccgctcttcagtgctgcactctactcaggacctgttcctgcccttcttctcaaacgtcacctggttccacgccatccacgtgtccggcaccaacggcactaagagattcgacaacccagtgctgcctttcaacgacggcgtctacttcgcttctaccgagaagtcaaacatcatccgcggatggatcttcggcaccactctggactccaagactcagagcctgctgatcgtcaacaacgccaccaacgtggtcatcaaggtgtgcgaattccagttctgcaacgacccattcctggacgtgtactaccacgagaacaacaagtctcgcatggagtcagaattgagagtctactccagcgctaacaactgcactttcgagtacgtgtctcagcctttcctgatggacctggaaggaaagcagggtaacttcaagaacctgcgtgagttcgtcttcaagaacatcgacggttacttcaagatttactctaagcacaccccagtgaacctgggtagggacctgcctcagggcttctcagctctggagccactggtggacctgcctatcggcatcaacatcaccaggttccagactctgctggctctgcacagaagctacctgactccaggagactcatcttctagctggactgctggagctgctgcttactacgtgggttacctgcagcctcgcaccttcctgctgaagtacaacgaaaacggcaccatcactgacgccgtcgactgcgctctggaccctctgtctgaaaccaagtgcactctgaagtcattcaccgtggagaagggcatctaccagacttccaacttccgcgtgcagcccaccgaaagcatcgtccgtttccctaacatcactaacctgtgccccttccacgaggtcttcaacgccaccaccttcgcttctgtgtacgcctggaaccgcaagcgtatctctaactgcgtcgccgactactcagtgctgtacaacttcgctcccttcttcgccttcaagtgctacggagtgtcaccaactaagctgaacgacctgtgcttcaccaacgtctacgctgactctttcgtgatcaggggtaacgaggtctcacagatcgctccaggccagactggaaacatcgccgactacaactacaagctgcctgacgacttcaccggttgcgtcatcgcttggaactccaacaagctggacagcaaagtgagcggcaactacaactaccgttacaggctgttcagaaagtccaaactgaagcccttcgagcgtgacatcagcactgaaatctaccaggctggtaacaagccatgcaacggtgtcgccggctccaactgctacttccccctgcagtcctacggcttccgtccaacctacggtgtgggccaccagccttacagggtggtcgtgctgtccttcgaactcctccacgctccagctactgtgtgcggaccaaagaagagcaccaacctggtcaagaacaagtgcgtgaacttcaacttcaacggtctgaccggaactggtgtcctgaccgagtctaacaagaagttcctgcccttccagcagttcggtcgtgacatcgctgacactaccgacgccgtgagggacccccagaccctggaaatcctggacatcactccatgctctttcggaggtgtctcagtgatcactccaggaaccaacatctcaaaccaggtcgctgtgctgtaccagggtgtcaactgcaccgaagtccctgtggccatccacgctgaccagctgacccccacttggagagtgtacagcaccggctctaacgtcttccagactcgcgctggttgcctgatcggcgccgagtacgtgaacaactcttacgaatgcgacatccccatcggcgctggaatctgcgcctcataccagacccagactaagtcccaccagcaggctcagagcgtcgcctcacagtccatcatcgcttacaccatgtctctgggcgctgaaaactcagtggcctactcaaacaactccatcgccatccctaccaacttcactatctccgtgaccactgagatcctgcccgtctccatgaccaagactagcgtggactgcactatgtacatctgcggagactccaccgaatgcagcaacctgctgctgcagtacggtagcttctgcacccagctgaagcgtgctctgactggcatcgccgtggagcaggacaagaacactcaggaagtcttcgctcaggtgaagcaaatctacaagacccctcccatcaagtacttcggcggattcaacttctcccagatcctgcctgaccccagcaagccatctaagagatcattcatcgaggacctgctgttcaacaaggtcactctggccgacgctggtttcatcaagcagtacggagactgcctgggtgacatcgccgctcgcgacctgatctgcgctcagaagttcaacggcctgaccgtgctgccacctctgctgactgacgaaatgatcgcccagtacacttccgccctgctggctggaaccatcacttctggttggaccttcggtgctggtgctgctctgcagatccctttcgctatgcagatggcctacaggttcaacggaatcggtgtcacccagaacgtgctgtacgagaaccagaagctgatcgctaaccagttcaactccgccatcggcaagatccaggactccctgagctctactgccagcgctctgggaaagctgcaggacgtcgtgaaccacaacgcccaggctctgaacaccctggtcaagcagctgtcatccaagttcggagctatcagctctgtgctgaacgacatcctctcccgcctggaccctcctgaggctgaagtccagatcgacaggctgatcactggtagactgcagtctctgcagacctacgtgactcagcagctgatccgcgccgctgaaatccgtgcctcagctaacctggccgctaccaagatgtctgagtgcgtcctgggccagagcaagagggtggacttctgcggcaagggataccacctgatgtctttccctcagtcagctccccacggagtcgtgttcctgcacgtcacctacgtgccagcccaggagaagaacttcaccactgcccctgctatctgccacgacggcaaggctcacttcccccgtgaaggagtcttcgtgtccaacggcacccactggttcgtcactcagaggaacttctacgagccacagatcatcaccactgacaacactttcgtgagcggcaactgcgacgtggtcatcggtatcgtcaacaacaccgtgtacgaccccctgcagccagagctggactccttcaaggaagagctggacaagtacttcaagaaccacaccagcccagacgtcgacctgggcgacatctctggaatcaacgcttcagtcgtgaacatccagaaggagatcgaccgtctgaacgaagtggccaagaacctgaacgaatctctgatcaacctgcaggagctgggaaagtacgaacagtacatcaagtggccttggtacatctggctgggtttcatcgctggcctcatcgctatcgtgatggtgaccatcatgctgtgctgcatgacttcctgctgcagctgcctgaagggctgctgctcttgcggatcatgctgcaagttcgacgaggacgactcagaacccgtcctgaagggcgtgaagctgcactacacctaa

SEQ ID NO: 211 - protein, 1268 aa, synthetic construct
MFVFLVLLPLVSSQCVNLITRTQSYTNSFTRGVYYPDKVFRSSVLHSTQDLFLPFFSNVTWFHAISGTNGTKRFDNPVLPFNDGVYFASTEKSNIIRGWIFGTTLDSKTQSLLIVNNATNVVIKVCEFQFCNDPFLDVYYHKNNKSWMESEFRVYSSANNCTFEYVSQPFLMDLEGKQGNFKNLREFVFKNIDGYFKIYSKHTPINLGRDLPQGFSALEPLVDLPIGINITRFQTLLALHRSYLTPGDSSSGWTAGAAAYYVGYLQPRTFLLKYNENGTITDAVDCALDPLSETKCTLKSFTVEKGIYQTSNFRVQPTESIVRFPNITNLCPFDEVFNATTFASVYAWNRKRISNCVADYSVLYNFAPFFAFKCYGVSPTKLNDLCFTNVYADSFVIRGNEVSQIAPGQTGNIADYNYKLPDDFTGCVIAWNSNKLDSKVGGNYNYRYRLFRKSNLKPFERDISTEIYQAGNKPCNGVAGVNCYFPLQSYGFRPTYGVGHQPYRVVVLSFELLHAPATVCGPKKSTNLVKNKCVNFNFNGLTGTGVLTESNKKFLPFQQFGRDIADTTDAVRDPQTLEILDITPCSFGGVSVITPGTNTSNQVAVLYQGVNCTEVPVAIHADQLTPTWRVYSTGSNVFQTRAGCLIGAEYVNNSYECDIPIGAGICASYQTQTKSHQQAQSVASQSIIAYTMSLGAENSVAYSNNSIAIPTNFTISVTTEILPVSMTKTSVDCTMYICGDSTECSNLLLQYGSFCTQLKRALTGIAVEQDKNTQEVFAQVKQIYKTPPIKYFGGFNFSQILPDPSKPSKRSFIEDLLFNKVTLADAGFIKQYGDCLGDIAARDLICAQKFNGLTVLPPLLTDEMIAQYTSALLAGTITSGWTFGAGAALQIPFAMQMAYRFNGIGVTQNVLYENQKLIANQFNSAIGKIQDSLSSTASALGKLQDVVNHNAQALNTLVKQLSSKFGAISSVLNDILSRLDPPEAEVQIDRLITGRLQSLQTYVTQQLIRAAEIRASANLAATKMSECVLGQSKRVDFCGKGYHLMSFPQSAPHGVVFLHVTYVPAQEKNFTTAPAICHDGKAHFPREGVFVSNGTHWFVTQRNFYEPQIITTDNTFVSGNCDVVIGIVNNTVYDPLQPELDSFKEELDKYFKNHTSPDVDLGDISGINASVVNIQKEIDRLNEVAKNLNESLIDLQELGKYEQYIKWPWYIWLGFIAGLIAIVMVTIMLCCMTSCCSCLKGCCSCGSCCKFDEDDSEPVLKGVKLHYT

SEQ ID NO: 212 - DNA, 3807 bp, synthetic construct
  source 1..3807: mol_type = other DNA
atgttcgtcttcctggtgctgctgcctctggtctccagccagtgcgtgaacctgatcaccaggactcagtcctacaccaacagcttcactagaggtgtgtactaccctgacaaggtcttccgctcttcagtgctgcactctactcaggacctgttcctgcccttcttctcaaacgtcacctggttccacgccatctccggcaccaacggcactaagagattcgacaacccagtgctgcctttcaacgacggcgtctacttcgcttctaccgagaagtcaaacatcatccgcggatggatcttcggcaccactctggactccaagactcagagcctgctgatcgtcaacaacgccaccaacgtggtcatcaaggtgtgcgaattccagttctgcaacgacccattcctggacgtgtactaccacaagaacaacaagtcttggatggagtcagaattcagagtctactccagcgctaacaactgcactttcgagtacgtgtctcagcctttcctgatggacctggaaggaaagcagggtaacttcaagaacctgcgtgagttcgtcttcaagaacatcgacggttacttcaagatttactctaagcacaccccaatcaacctgggtagggacctgcctcagggcttctcagctctggagccactggtggacctgcctatcggcatcaacatcaccaggttccagactctgctggctctgcacagaagctacctgactccaggagactcatcttctggatggactgctggagctgctgcttactacgtgggttacctgcagcctcgcaccttcctgctgaagtacaacgaaaacggcaccatcactgacgccgtcgactgcgctctggaccctctgtctgaaaccaagtgcactctgaagtcattcaccgtggagaagggcatctaccagacttccaacttccgcgtgcagcccaccgaaagcatcgtccgtttccctaacatcactaacctgtgccccttcgacgaggtcttcaacgccaccaccttcgcttctgtgtacgcctggaaccgcaagcgtatctctaactgcgtcgccgactactcagtgctgtacaacttcgctcccttcttcgccttcaagtgctacggagtgtcaccaactaagctgaacgacctgtgcttcaccaacgtctacgctgactctttcgtgatcaggggtaacgaggtctcacagatcgctccaggccagactggaaacatcgccgactacaactacaagctgcctgacgacttcaccggttgcgtcatcgcttggaactccaacaagctggacagcaaagtgggtggcaactacaactaccgttacaggctgttcagaaagtccaacctgaagcccttcgagcgtgacatcagcactgaaatctaccaggctggtaacaagccatgcaacggtgtcgccggcgtcaactgctacttccccctgcagtcctacggcttccgtccaacctacggtgtgggccaccagccttacagggtggtcgtgctgtccttcgaactcctccacgctccagctactgtgtgcggaccaaagaagagcaccaacctggtcaagaacaagtgcgtgaacttcaacttcaacggtctgaccggaactggtgtcctgaccgagtctaacaagaagttcctgcccttccagcagttcggtcgtgacatcgctgacactaccgacgccgtgagggacccccagaccctggaaatcctggacatcactccatgctctttcggaggtgtctcagtgatcactccaggaaccaacacttcaaaccaggtcgctgtgctgtaccagggtgtcaactgcaccgaagtccctgtggccatccacgctgaccagctgacccccacttggagagtgtacagcaccggctctaacgtcttccagactcgcgctggttgcctgatcggcgccgagtacgtgaacaactcttacgaatgcgacatccccatcggcgctggaatctgcgcctcataccagacccagactaagtcccaccagcaggctcagagcgtcgcctcacagtccatcatcgcttacaccatgtctctgggcgctgaaaactcagtggcctactcaaacaactccatcgccatccctaccaacttcactatctccgtgaccactgagatcctgcccgtctccatgaccaagactagcgtggactgcactatgtacatctgcggagactccaccgaatgcagcaacctgctgctgcagtacggtagcttctgcacccagctgaagcgtgctctgactggcatcgccgtggagcaggacaagaacactcaggaagtcttcgctcaggtgaagcaaatctacaagacccctcccatcaagtacttcggcggattcaacttctcccagatcctgcctgaccccagcaagccatctaagagatcattcatcgaggacctgctgttcaacaaggtcactctggccgacgctggtttcatcaagcagtacggagactgcctgggtgacatcgccgctcgcgacctgatctgcgctcagaagttcaacggcctgaccgtgctgccacctctgctgactgacgaaatgatcgcccagtacacttccgccctgctggctggaaccatcacttctggttggaccttcggtgctggtgctgctctgcagatccctttcgctatgcagatggcctacaggttcaacggaatcggtgtcacccagaacgtgctgtacgagaaccagaagctgatcgctaaccagttcaactccgccatcggcaagatccaggactccctgagctctactgccagcgctctgggaaagctgcaggacgtcgtgaaccacaacgcccaggctctgaacaccctggtcaagcagctgtcatccaagttcggagctatcagctctgtgctgaacgacatcctctcccgcctggaccctcctgaggctgaagtccagatcgacaggctgatcactggtagactgcagtctctgcagacctacgtgactcagcagctgatccgcgccgctgaaatccgtgcctcagctaacctggccgctaccaagatgtctgagtgcgtcctgggccagagcaagagggtggacttctgcggcaagggataccacctgatgtctttccctcagtcagctccccacggagtcgtgttcctgcacgtcacctacgtgccagcccaggagaagaacttcaccactgcccctgctatctgccacgacggcaaggctcacttcccccgtgaaggagtcttcgtgtccaacggcacccactggttcgtcactcagaggaacttctacgagccacagatcatcaccactgacaacactttcgtgagcggcaactgcgacgtggtcatcggtatcgtcaacaacaccgtgtacgaccccctgcagccagagctggactccttcaaggaagagctggacaagtacttcaagaaccacaccagcccagacgtcgacctgggcgacatctctggaatcaacgcttcagtcgtgaacatccagaaggagatcgaccgtctgaacgaagtggccaagaacctgaacgaatctctgatcgacctgcaggagctgggaaagtacgaacagtacatcaagtggccttggtacatctggctgggtttcatcgctggcctcatcgctatcgtgatggtgaccatcatgctgtgctgcatgacttcctgctgcagctgcctgaagggctgctgctcttgcggatcatgctgcaagttcgacgaggacgactcagaacccgtcctgaagggcgtgaagctgcactacacctaa

SEQ ID NO: 213 - protein, 1268 aa, synthetic construct
MFVFLVLLPLVSSQCVNLITRTQSYTNSFTRGVYYPDKVFRSSVLHSTQDLFLPFFSNVTWFHAISGTNGTKRFDNPVLPFNDGVYFASTEKSNIIRGWIFGTTLDSKTQSLLIVNNATNVVIKVCEFQFCNDPFLDVYYHKNNKSWMESEFRVYSSANNCTFEYVSQPFLMDLEGKQGNFKNLREFVFKNIDGYFKIYSKHTPINLGRDLPQGFSALEPLVDLPIGINITRFQTLLALHRSYLTPGDSSSGWTAGAAAYYVGYLQPRTFLLKYNENGTITDAVDCALDPLSETKCTLKSFTVEKGIYQTSNFRVQPTESIVRFPNITNLCPFDEVFNATTFASVYAWNRKRISNCVADYSVLYNFAPFFAFKCYGVSPTKLNDLCFTNVYADSFVIRGNEVSQIAPGQTGNIADYNYKLPDDFTGCVIAWNSNKLDSTVGGNYNYRYRLFRKSKLKPFERDISTEIYQAGNKPCNGVAGVNCYFPLQSYGFRPTYGVGHQPYRVVVLSFELLHAPATVCGPKKSTNLVKNKCVNFNFNGLTGTGVLTESNKKFLPFQQFGRDIADTTDAVRDPQTLEILDITPCSFGGVSVITPGTNTSNQVAVLYQGVNCTEVPVAIHADQLTPTWRVYSTGSNVFQTRAGCLIGAEYVNNSYECDIPIGAGICASYQTQTKSHQQAQSVASQSIIAYTMSLGAENSVAYSNNSIAIPTNFTISVTTEILPVSMTKTSVDCTMYICGDSTECSNLLLQYGSFCTQLKRALTGIAVEQDKNTQEVFAQVKQIYKTPPIKYFGGFNFSQILPDPSKPSKRSFIEDLLFNKVTLADAGFIKQYGDCLGDIAARDLICAQKFNGLTVLPPLLTDEMIAQYTSALLAGTITSGWTFGAGAALQIPFAMQMAYRFNGIGVTQNVLYENQKLIANQFNSAIGKIQDSLSSTASALGKLQDVVNHNAQALNTLVKQLSSKFGAISSVLNDILSRLDPPEAEVQIDRLITGRLQSLQTYVTQQLIRAAEIRASANLAATKMSECVLGQSKRVDFCGKGYHLMSFPQSAPHGVVFLHVTYVPAQEKNFTTAPAICHDGKAHFPREGVFVSNGTHWFVTQRNFYEPQIITTDNTFVSGNCDVVIGIVNNTVYDPLQPELDSFKEELDKYFKNHTSPDVDLGDISGINASVVNIQKEIDRLNEVAKNLNESLIDLQELGKYEQYIKWPWYIWLGFIAGLIAIVMVTIMLCCMTSCCSCLKGCCSCGSCCKFDEDDSEPVLKGVKLHYT

SEQ ID NO: 214 - DNA, 3807 bp, synthetic construct
  source 1..3807: mol_type = other DNA
atgttcgtcttcctggtgctgctgcctctggtctccagccagtgcgtgaacctgatcaccaggactcagtcctacaccaacagcttcactagaggtgtgtactaccctgacaaggtcttccgctcttcagtgctgcactctactcaggacctgttcctgcccttcttctcaaacgtcacctggttccacgccatctccggcaccaacggcactaagagattcgacaacccagtgctgcctttcaacgacggcgtctacttcgcttctaccgagaagtcaaacatcatccgcggatggatcttcggcaccactctggactccaagactcagagcctgctgatcgtcaacaacgccaccaacgtggtcatcaaggtgtgcgaattccagttctgcaacgacccattcctggacgtgtactaccacaagaacaacaagtcttggatggagtcagaattcagagtctactccagcgctaacaactgcactttcgagtacgtgtctcagcctttcctgatggacctggaaggaaagcagggtaacttcaagaacctgcgtgagttcgtcttcaagaacatcgacggttacttcaagatttactctaagcacaccccaatcaacctgggtagggacctgcctcagggcttctcagctctggagccactggtggacctgcctatcggcatcaacatcaccaggttccagactctgctggctctgcacagaagctacctgactccaggagactcatcttctggatggactgctggagctgctgcttactacgtgggttacctgcagcctcgcaccttcctgctgaagtacaacgaaaacggcaccatcactgacgccgtcgactgcgctctggaccctctgtctgaaaccaagtgcactctgaagtcattcaccgtggagaagggcatctaccagacttccaacttccgcgtgcagcccaccgaaagcatcgtccgtttccctaacatcactaacctgtgccccttcgacgaggtcttcaacgccaccaccttcgcttctgtgtacgcctggaaccgcaagcgtatctctaactgcgtcgccgactactcagtgctgtacaacttcgctcccttcttcgccttcaagtgctacggagtgtcaccaactaagctgaacgacctgtgcttcaccaacgtctacgctgactctttcgtgatcaggggtaacgaggtctcacagatcgctccaggccagactggaaacatcgccgactacaactacaagctgcctgacgacttcaccggttgcgtcatcgcttggaactccaacaagctggacagcaccgtgggtggcaactacaactaccgttacaggctgttcagaaagtccaagctgaagcccttcgagcgtgacatcagcactgaaatctaccaggctggtaacaagccatgcaacggtgtcgccggcgtcaactgctacttccccctgcagtcctacggcttccgtccaacctacggtgtgggccaccagccttacagggtggtcgtgctgtccttcgaactcctccacgctccagctactgtgtgcggaccaaagaagagcaccaacctggtcaagaacaagtgcgtgaacttcaacttcaacggtctgaccggaactggtgtcctgaccgagtctaacaagaagttcctgcccttccagcagttcggtcgtgacatcgctgacactaccgacgccgtgagggacccccagaccctggaaatcctggacatcactccatgctctttcggaggtgtctcagtgatcactccaggaaccaacacttcaaaccaggtcgctgtgctgtaccagggtgtcaactgcaccgaagtccctgtggccatccacgctgaccagctgacccccacttggagagtgtacagcaccggctctaacgtcttccagactcgcgctggttgcctgatcggcgccgagtacgtgaacaactcttacgaatgcgacatccccatcggcgctggaatctgcgcctcataccagacccagactaagtcccaccagcaggctcagagcgtcgcctcacagtccatcatcgcttacaccatgtctctgggcgctgaaaactcagtggcctactcaaacaactccatcgccatccctaccaacttcactatctccgtgaccactgagatcctgcccgtctccatgaccaagactagcgtggactgcactatgtacatctgcggagactccaccgaatgcagcaacctgctgctgcagtacggtagcttctgcacccagctgaagcgtgctctgactggcatcgccgtggagcaggacaagaacactcaggaagtcttcgctcaggtgaagcaaatctacaagacccctcccatcaagtacttcggcggattcaacttctcccagatcctgcctgaccccagcaagccatctaagagatcattcatcgaggacctgctgttcaacaaggtcactctggccgacgctggtttcatcaagcagtacggagactgcctgggtgacatcgccgctcgcgacctgatctgcgctcagaagttcaacggcctgaccgtgctgccacctctgctgactgacgaaatgatcgcccagtacacttccgccctgctggctggaaccatcacttctggttggaccttcggtgctggtgctgctctgcagatccctttcgctatgcagatggcctacaggttcaacggaatcggtgtcacccagaacgtgctgtacgagaaccagaagctgatcgctaaccagttcaactccgccatcggcaagatccaggactccctgagctctactgccagcgctctgggaaagctgcaggacgtcgtgaaccacaacgcccaggctctgaacaccctggtcaagcagctgtcatccaagttcggagctatcagctctgtgctgaacgacatcctctcccgcctggaccctcctgaggctgaagtccagatcgacaggctgatcactggtagactgcagtctctgcagacctacgtgactcagcagctgatccgcgccgctgaaatccgtgcctcagctaacctggccgctaccaagatgtctgagtgcgtcctgggccagagcaagagggtggacttctgcggcaagggataccacctgatgtctttccctcagtcagctccccacggagtcgtgttcctgcacgtcacctacgtgccagcccaggagaagaacttcaccactgcccctgctatctgccacgacggcaaggctcacttcccccgtgaaggagtcttcgtgtccaacggcacccactggttcgtcactcagaggaacttctacgagccacagatcatcaccactgacaacactttcgtgagcggcaactgcgacgtggtcatcggtatcgtcaacaacaccgtgtacgaccccctgcagccagagctggactccttcaaggaagagctggacaagtacttcaagaaccacaccagcccagacgtcgacctgggcgacatctctggaatcaacgcttcagtcgtgaacatccagaaggagatcgaccgtctgaacgaagtggccaagaacctgaacgaatctctgatcgacctgcaggagctgggaaagtacgaacagtacatcaagtggccttggtacatctggctgggtttcatcgctggcctcatcgctatcgtgatggtgaccatcatgctgtgctgcatgacttcctgctgcagctgcctgaagggctgctgctcttgcggatcatgctgcaagttcgacgaggacgactcagaacccgtcctgaagggcgtgaagctgcactacacctaa

SEQ ID NO: 215 - protein, 1268 aa, synthetic construct
MFVFLVLLPLVSSQCVNLITRTQSYTNSFTRGVYYPDKVFRSSVLHSTQDLFLPFFSNVTWFHAISGTNGTKRFDNPVLPFNDGVYFASTEKSNIIRGWIFGTTLDSKTQSLLIVNNATNVVIKVCEFQFCNDPFLDVYYHKNNKSWMESEFRVYSSANNCTFEYVSQPFLMDLEGKQGNFKNLREFVFKNIDGYFKIYSKHTPINLGRDLPQGFSALEPLVDLPIGINITRFQTLLALHRSYLTPGDSSSGWTAGAAAYYVGYLQPRTFLLKYNENGTITDAVDCALDPLSETKCTLKSFTVEKGIYQTSNFRVQPTESIVRFPNITNLCPFDEVFNATRFASVYAWNRKRISNCVADYSVLYNFAPFFAFKCYGVSPTKLNDLCFTNVYADSFVIRGNEVSQIAPGQTGNIADYNYKLPDDFTGCVIAWNSNKLDSTVGGNYNYRYRLFRKSKLKPFERDISTEIYQAGNKPCNGVAGVNCYFPLQSYGFRPTYGVGHQPYRVVVLSFELLHAPATVCGPKKSTNLVKNKCVNFNFNGLTGTGVLTESNKKFLPFQQFGRDIADTTDAVRDPQTLEILDITPCSFGGVSVITPGTNTSNQVAVLYQGVNCTEVPVAIHADQLTPTWRVYSTGSNVFQTRAGCLIGAEYVNNSYECDIPIGAGICASYQTQTKSHQQAQSVASQSIIAYTMSLGAENSVAYSNNSIAIPTNFTISVTTEILPVSMTKTSVDCTMYICGDSTECSNLLLQYGSFCTQLKRALTGIAVEQDKNTQEVFAQVKQIYKTPPIKYFGGFNFSQILPDPSKPSKRSFIEDLLFNKVTLADAGFIKQYGDCLGDIAARDLICAQKFNGLTVLPPLLTDEMIAQYTSALLAGTITSGWTFGAGAALQIPFAMQMAYRFNGIGVTQNVLYENQKLIANQFNSAIGKIQDSLSSTASALGKLQDVVNHNAQALNTLVKQLSSKFGAISSVLNDILSRLDPPEAEVQIDRLITGRLQSLQTYVTQQLIRAAEIRASANLAATKMSECVLGQSKRVDFCGKGYHLMSFPQSAPHGVVFLHVTYVPAQEKNFTTAPAICHDGKAHFPREGVFVSNGTHWFVTQRNFYEPQIITTDNTFVSGNCDVVIGIVNNTVYDPLQPELDSFKEELDKYFKNHTSPDVDLGDISGINASVVNIQKEIDRLNEVAKNLNESLIDLQELGKYEQYIKWPWYIWLGFIAGLIAIVMVTIMLCCMTSCCSCLKGCCSCGSCCKFDEDDSEPVLKGVKLHYT

SEQ ID NO: 216 - DNA, 3807 bp, synthetic construct
  source 1..3807: mol_type = other DNA
atgttcgtcttcctggtgctgctgcctctggtctccagccagtgcgtgaacctgatcaccaggactcagtcctacaccaacagcttcactagaggtgtgtactaccctgacaaggtcttccgctcttcagtgctgcactctactcaggacctgttcctgcccttcttctcaaacgtcacctggttccacgccatctccggcaccaacggcactaagagattcgacaacccagtgctgcctttcaacgacggcgtctacttcgcttctaccgagaagtcaaacatcatccgcggatggatcttcggcaccactctggactccaagactcagagcctgctgatcgtcaacaacgccaccaacgtggtcatcaaggtgtgcgaattccagttctgcaacgacccattcctggacgtgtactaccacaagaacaacaagtcttggatggagtcagaattcagagtctactccagcgctaacaactgcactttcgagtacgtgtctcagcctttcctgatggacctggaaggaaagcagggtaacttcaagaacctgcgtgagttcgtcttcaagaacatcgacggttacttcaagatttactctaagcacaccccaatcaacctgggtagggacctgcctcagggcttctcagctctggagccactggtggacctgcctatcggcatcaacatcaccaggttccagactctgctggctctgcacagaagctacctgactccaggagactcatcttctggatggactgctggagctgctgcttactacgtgggttacctgcagcctcgcaccttcctgctgaagtacaacgaaaacggcaccatcactgacgccgtcgactgcgctctggaccctctgtctgaaaccaagtgcactctgaagtcattcaccgtggagaagggcatctaccagacttccaacttccgcgtgcagcccaccgaaagcatcgtccgtttccctaacatcactaacctgtgccccttcgacgaggtcttcaacgccacccgtttcgcttctgtgtacgcctggaaccgcaagcgtatctctaactgcgtcgccgactactcagtgctgtacaacttcgctcccttcttcgccttcaagtgctacggagtgtcaccaactaagctgaacgacctgtgcttcaccaacgtctacgctgactctttcgtgatcaggggtaacgaggtctcacagatcgctccaggccagactggaaacatcgccgactacaactacaagctgcctgacgacttcaccggttgcgtcatcgcttggaactccaacaagctggacagcaccgtgggtggcaactacaactaccgttacaggctgttcagaaagtccaagctgaagcccttcgagcgtgacatcagcactgaaatctaccaggctggtaacaagccatgcaacggtgtcgccggcgtcaactgctacttccccctgcagtcctacggcttccgtccaacctacggtgtgggccaccagccttacagggtggtcgtgctgtccttcgaactcctccacgctccagctactgtgtgcggaccaaagaagagcaccaacctggtcaagaacaagtgcgtgaacttcaacttcaacggtctgaccggaactggtgtcctgaccgagtctaacaagaagttcctgcccttccagcagttcggtcgtgacatcgctgacactaccgacgccgtgagggacccccagaccctggaaatcctggacatcactccatgctctttcggaggtgtctcagtgatcactccaggaaccaacacttcaaaccaggtcgctgtgctgtaccagggtgtcaactgcaccgaagtccctgtggccatccacgctgaccagctgacccccacttggagagtgtacagcaccggctctaacgtcttccagactcgcgctggttgcctgatcggcgccgagtacgtgaacaactcttacgaatgcgacatccccatcggcgctggaatctgcgcctcataccagacccagactaagtcccaccagcaggctcagagcgtcgcctcacagtccatcatcgcttacaccatgtctctgggcgctgaaaactcagtggcctactcaaacaactccatcgccatccctaccaacttcactatctccgtgaccactgagatcctgcccgtctccatgaccaagactagcgtggactgcactatgtacatctgcggagactccaccgaatgcagcaacctgctgctgcagtacggtagcttctgcacccagctgaagcgtgctctgactggcatcgccgtggagcaggacaagaacactcaggaagtcttcgctcaggtgaagcaaatctacaagacccctcccatcaagtacttcggcggattcaacttctcccagatcctgcctgaccccagcaagccatctaagagatcattcatcgaggacctgctgttcaacaaggtcactctggccgacgctggtttcatcaagcagtacggagactgcctgggtgacatcgccgctcgcgacctgatctgcgctcagaagttcaacggcctgaccgtgctgccacctctgctgactgacgaaatgatcgcccagtacacttccgccctgctggctggaaccatcacttctggttggaccttcggtgctggtgctgctctgcagatccctttcgctatgcagatggcctacaggttcaacggaatcggtgtcacccagaacgtgctgtacgagaaccagaagctgatcgctaaccagttcaactccgccatcggcaagatccaggactccctgagctctactgccagcgctctgggaaagctgcaggacgtcgtgaaccacaacgcccaggctctgaacaccctggtcaagcagctgtcatccaagttcggagctatcagctctgtgctgaacgacatcctctcccgcctggaccctcctgaggctgaagtccagatcgacaggctgatcactggtagactgcagtctctgcagacctacgtgactcagcagctgatccgcgccgctgaaatccgtgcctcagctaacctggccgctaccaagatgtctgagtgcgtcctgggccagagcaagagggtggacttctgcggcaagggataccacctgatgtctttccctcagtcagctccccacggagtcgtgttcctgcacgtcacctacgtgccagcccaggagaagaacttcaccactgcccctgctatctgccacgacggcaaggctcacttcccccgtgaaggagtcttcgtgtccaacggcacccactggttcgtcactcagaggaacttctacgagccacagatcatcaccactgacaacactttcgtgagcggcaactgcgacgtggtcatcggtatcgtcaacaacaccgtgtacgaccccctgcagccagagctggactccttcaaggaagagctggacaagtacttcaagaaccacaccagcccagacgtcgacctgggcgacatctctggaatcaacgcttcagtcgtgaacatccagaaggagatcgaccgtctgaacgaagtggccaagaacctgaacgaatctctgatcgacctgcaggagctgggaaagtacgaacagtacatcaagtggccttggtacatctggctgggtttcatcgctggcctcatcgctatcgtgatggtgaccatcatgctgtgctgcatgacttcctgctgcagctgcctgaagggctgctgctcttgcggatcatgctgcaagttcgacgaggacgactcagaacccgtcctgaagggcgtgaagctgcactacacctaa

SEQ ID NO: 217 - protein, 1257 aa, synthetic construct; identical to SEQ ID NO: 175

SEQ ID NO: 218 - protein, 1257 aa, synthetic construct; identical to SEQ ID NO: 195

SEQ ID NO: 219 - protein, 1257 aa, synthetic construct
QCVNLITRTQSYTNSFTRGVYYPDKVFRSSVLHSTQDLFLPFFSNVTWFHAIHVSGTNGTKRFDNPVLPFNDGVYFASTEKSNIIRGWIFGTTLDSKTQSLLIVNNATNVVIKVCEFQFCNDPFLDVYYHKNNKSWMESEFRVYSSANNCTFEYVSQPFLMDLEGKQGNFKNLREFVFKNIDGYFKIYSKHTPINLGRDLPQGFSALEPLVDLPIGINITRFQTLLALHRSYLTPGDSSSGWTAGAAAYYVGYLQPRTFLLKYNENGTITDAVDCALDPLSETKCTLKSFTVEKGIYQTSNFRVQPTESIVRFPNITNLCPFDEVFNATRFASVYAWNRKRISNCVADYSVLYNFAPFFAFKCYGVSPTKLNDLCFTNVYADSFVIRGNEVSQIAPGQTGNIADYNYKLPDDFTGCVIAWNSNKLDSKVGGNYNYQYRLFRKSNLKPFERDISTEIYQAGNKPCNGVAGFNCYFPLRSYGFRPTYGVGHQPYRVVVLSFELLHAPATVCGPKKSTNLVKNKCVNFNFNGLTGTGVLTESNKKFLPFQQFGRDIADTTDAVRDPQTLEILDITPCSFGGVSVITPGTNTSNQVAVLYQGVNCTEVPVAIHADQLTPTWRVYSTGSNVFQTRAGCLIGAEYVNNSYECDIPIGAGICASYQTQTKSHQQAQSVASQSIIAYTMSLGAENLVAYSNNSIAIPTNFTISVTTEILPVSMTKTSVDCTMYICGDSTECSNLLLQYGSFCTQLKRALTGIAVEQDKNTQEVFAQVKQIYKTPPIKYFGGFNFSQILPDPSKPSKRSFIEDLLFNKVTLADAGFIKQYGDCLGDIAARDLICAQKFNGLTVLPPLLTDEMIAQYTSALLAGTITSGWTFGAGAALQIPFAMQMAYRFNGIGVTQNVLYENQKLIANQFNSAIGKIQDSLSSTASALGKLQDVVNHNAQALNTLVKQLSSKFGAISSVLNDILSRLDPPEAEVQIDRLITGRLQSLQTYVTQQLIRAAEIRASANLAATKMSECVLGQSKRVDFCGKGYHLMSFPQSAPHGVVFLHVTYVPAQEKNFTTAPAICHDGKAHFPREGVFVSNGTHWFVTQRNFYEPQIITTDNTFVSGNCDVVIGIVNNTVYDPLQPELDSFKEELDKYFKNHTSPDVDLGDISGINASVVNIQKEIDRLNEVAKNLNESLIDLQELGKYEQYIKWPWYIWLGFIAGLIAIVMVTIMLCCMTSCCSCLKGCCSCGSCCKFDEDDSEPVLKGVKLHYT

SEQ ID NO: 220 - protein, 1257 aa, synthetic construct; identical to SEQ ID NO: 186

SEQ ID NO: 221 - protein, 1255 aa, synthetic construct; identical to SEQ ID NO: 190

SEQ ID NO: 222 - protein, 1255 aa, synthetic construct; identical to SEQ ID NO: 192

SEQ ID NO: 223 - protein, 1257 aa, synthetic construct
QCVNLITRTQSYTNSFTRGVYYPDKVFRSSVLHSTQDLFLPFFSNVTWFHAIHVSGTNGTKRFDNPVLPFNDGVYFASTEKSNIIRGWIFGTTLDSKTQSLLIVNNATNVVIKVCEFQFCNDPFLDVYYHENNKSRMESELRVYSSANNCTFEYVSQPFLMDLEGKQGNFKNLREFVFKNIDGYFKIYSKHTPVNLGRDLPQGFSALEPLVDLPIGINITRFQTLLALHRSYLTPGDSSSSWTAGAAAYYVGYLQPRTFLLKYNENGTITDAVDCALDPLSETKCTLKSFTVEKGIYQTSNFRVQPTESIVRFPNITNLCPFHEVFNATRFASVYAWNRKRISNCVADYSVLYNFAPFFAFKCYGVSPTKLNDLCFTNVYADSFVIRGNEVSQIAPGQTGNIADYNYKLPDDFTGCVIAWNSNKLDSKVSGNYNYLYRLFRKSKLKPFERDISTEIYQAGNKPCNGVAGFNCYFPLQSYGFRPTYGVGHQPYRVVVLSFELLHAPATVCGPKKSTNLVKNKCVNFNFNGLTGTGVLTESNKKFLPFQQFGRDIADTTDAVRDPQTLEILDITPCSFGGVSVITPGTNTSNQVAVLYQGVNCTEVPVAIHADQLTPTWRVYSTGSNVFQTRAGCLIGAEYVNNSYECDIPIGAGICASYQTQTKSHQQAQSVASQSIIAYTMSLGAENSVAYSNNSIAIPTNFTISVTTEILPVSMTKTSVDCTMYICGDSTECSNLLLQYGSFCTQLKRALTGIAVEQDKNTQEVFAQVKQIYKTPPIKYFGGFNFSQILPDPSKPSKRSFIEDLLFNKVTLADAGFIKQYGDCLGDIAARDLICAQKFNGLTVLPPLLTDEMIAQYTSALLAGTITSGWTFGAGAALQIPFAMQMAYRFNGIGVTQNVLYENQKLIANQFNSAIGKIQDSLSSTASALGKLQDVVNHNAQALNTLVKQLSSKFGAISSVLNDILSRLDPPEAEVQIDRLITGRLQSLQTYVTQQLIRAAEIRASANLAATKMSECVLGQSKRVDFCGKGYHLMSFPQSAPHGVVFLHVTYVPAQEKNFTTAPAICHDGKAHFPREGVFVSNGTHWFVTQRNFYEPQIITTDNTFVSGNCDVVIGIVNNTVYDPLQPELDSFKEELDKYFKNHTSPDVDLGDISGINASVVNIQKEIDRLNEVAKNLNESLIDLQELGKYEQYIKWPWYIWLGFIAGLIAIVMVTIMLCCMTSCCSCLKGCCSCGSCCKFDEDDSEPVLKGVKLHYT

SEQ ID NO: 224 - protein, 1257 aa, synthetic construct
QCVNLITRTQSYTNSFTRGVYYPDKVFRSSVLHSTQDLFLPFFSNVTWFHAIHVSGTNGTKRFDNPVLPFNDGVYFASTEKSNIIRGWIFGTTLDSKTQSLLIVNNATNVVIKVCEFQFCNDPFLDVYYHENNKSRMESELRVYSSANNCTFEYVSQPFLMDLEGKQGNFKNLREFVFKNIDGYFKIYSKHTPVNLGRDLPQGFSALEPLVDLPIGINITRFQTLLALHRSYLTPGDSSSSWTAGAAAYYVGYLQPRTFLLKYNENGTITDAVDCALDPLSETKCTLKSFTVEKGIYQTSNFRVQPTESIVRFPNITNLCPFHEVFNATTFASVYAWNRKRISNCVADYSVLYNFAPFFAFKCYGVSPTKLNDLCFTNVYADSFVIRGNEVSQIAPGQTGNIADYNYKLPDDFTGCVIAWNSNKLDSKVSGNYNYRYRLFRKSKLKPFERDISTEIYQAGNKPCNGVAGSNCYFPLQSYGFRPTYGVGHQPYRVVVLSFELLHAPATVCGPKKSTNLVKNKCVNFNFNGLTGTGVLTESNKKFLPFQQFGRDIADTTDAVRDPQTLEILDITPCSFGGVSVITPGTNISNQVAVLYQGVNCTEVPVAIHADQLTPTWRVYSTGSNVFQTRAGCLIGAEYVNNSYECDIPIGAGICASYQTQTKSHQQAQSVASQSIIAYTMSLGAENSVAYSNNSIAIPTNFTISVTTEILPVSMTKTSVDCTMYICGDSTECSNLLLQYGSFCTQLKRALTGIAVEQDKNTQEVFAQVKQIYKTPPIKYFGGFNFSQILPDPSKPSKRSFIEDLLFNKVTLADAGFIKQYGDCLGDIAARDLICAQKFNGLTVLPPLLTDEMIAQYTSALLAGTITSGWTFGAGAALQIPFAMQMAYRFNGIGVTQNVLYENQKLIANQFNSAIGKIQDSLSSTASALGKLQDVVNHNAQALNTLVKQLSSKFGAISSVLNDILSRLDPPEAEVQIDRLITGRLQSLQTYVTQQLIRAAEIRASANLAATKMSECVLGQSKRVDFCGKGYHLMSFPQSAPHGVVFLHVTYVPAQEKNFTTAPAICHDGKAHFPREGVFVSNGTHWFVTQRNFYEPQIITTDNTFVSGNCDVVIGIVNNTVYDPLQPELDSFKEELDKYFKNHTSPDVDLGDISGINASVVNIQKEIDRLNEVAKNLNESLINLQELGKYEQYIKWPWYIWLGFIAGLIAIVMVTIMLCCMTSCCSCLKGCCSCGSCCKFDEDDSEPVLKGVKLHYT

SEQ ID NO: 225 - protein, 1255 aa, synthetic construct
QCVNLITRTQSYTNSFTRGVYYPDKVFRSSVLHSTQDLFLPFFSNVTWFHAISGTNGTKRFDNPVLPFNDGVYFASTEKSNIIRGWIFGTTLDSKTQSLLIVNNATNVVIKVCEFQFCNDPFLDVYYHKNNKSWMESEFRVYSSANNCTFEYVSQPFLMDLEGKQGNFKNLREFVFKNIDGYFKIYSKHTPINLGRDLPQGFSALEPLVDLPIGINITRFQTLLALHRSYLTPGDSSSGWTAGAAAYYVGYLQPRTFLLKYNENGTITDAVDCALDPLSETKCTLKSFTVEKGIYQTSNFRVQPTESIVRFPNITNLCPFDEVFNATTFASVYAWNRKRISNCVADYSVLYNFAPFFAFKCYGVSPTKLNDLCFTNVYADSFVIRGNEVSQIAPGQTGNIADYNYKLPDDFTGCVIAWNSNKLDSKVGGNYNYRYRLFRKSNLKPFERDISTEIYQAGNKPCNGVAGVNCYFPLQSYGFRPTYGVGHQPYRVVVLSFELLHAPATVCGPKKSTNLVKNKCVNFNFNGLTGTGVLTESNKKFLPFQQFGRDIADTTDAVRDPQTLEILDITPCSFGGVSVITPGTNTSNQVAVLYQGVNCTEVPVAIHADQLTPTWRVYSTGSNVFQTRAGCLIGAEYVNSSYECDIPIGAGICASYQTQTKSHQQAQSVASQSIIAYTMSLGAENSVAYSNNSIAIPTNFTISVTTEILPVSMTKTSVDCTMYICGDSTECSNLLLQYGSFCTQLKRALTGIAVEQDKNTQEVFAQVKQIYKTPPIKYFGGFNFSQILPDPSKPSKRSFIEDLLFNKVTLADAGFIKQYGDCLGDIAARDLICAQKFNGLTVLPPLLTDEMIAQYTSALLAGTITSGWTFGAGAALQIPFAMQMAYRFNGIGVTQNVLYENQKLIANQFNSAIGKIQDSLSSTASALGKLQDVVNHNAQALNTLVKQLSSKFGAISSVLNDILSRLDPPEAEVQIDRLITGRLQSLQTYVTQQLIRAAEIRASANLAATKMSECVLGQSKRVDFCGKGYHLMSFPQSAPHGVVFLHVTYVPAQEKNFTTAPAICHDGKAHFPREGVFVSNGTHWFVTQRNFYEPQIITTDNTFVSGNCDVVIGIVNNTVYDPLQPELDSFKEELDKYFKNHTSPDVDLGDISGINASVVNIQKEIDRLNEVAKNLNESLIDLQELGKYEQYIKWPWYIWLGFIAGLIAIVMVTIMLCCMTSCCSCLKGCCSCGSCCKFDEDDSEPVLKGVKLHYT

SEQ ID NO: 226 - protein, 1255 aa, synthetic construct
QCVNLITRTQSYTNSFTRGVYYPDKVFRSSVLHSTQDLFLPFFSNVTWFHAISGTNGTKRFDNPVLPFNDGVYFASTEKSNIIRGWIFGTTLDSKTQSLLIVNNATNVVIKVCEFQFCNDPFLDVYYHKNNKSWMESEFRVYSSANNCTFEYVSQPFLMDLEGKQGNFKNLREFVFKNIDGYFKIYSKHTPINLGRDLPQGFSALEPLVDLPIGINITRFQTLLALHRSYLTPGDSSSGWTAGAAAYYVGYLQPRTFLLKYNENGTITDAVDCALDPLSETKCTLKSFTVEKGIYQTSNFRVQPTESIVRFPNITNLCPFDEVFNATTFASVYAWNRKRISNCVADYSVLYNFAPFFAFKCYGVSPTKLNDLCFTNVYADSFVIRGNEVSQIAPGQTGNIADYNYKLPDDFTGCVIAWNSNKLDSKVGGNYNYRYRLFRKSNLKPFERDISTEIYQAGNKPCNGVAGVNCYFPLQSYGFRPTYGVGHQPYRVVVLSFELLHAPATVCGPKKSTNLVKNKCVNFNFNGLTGTGVLTESNKKFLPFQQFGRDIADTTDAVRDPQTLEILDITPCSFGGVSVITPGTNTSNQVAVLYQGVNCTEVPVAIHADQLTPTWRVYSTGSNVFQTRAGCLIGAEYVNNSYECDIPIGAGICASYQTQTKSHQQAQSVASQSIIAYTMSLGAENSVAYSNNSIAIPTNFTISVTTEILPVSMTKTSVDCTMYICGDSTECSNLLLQYGSFCTQLKRALTGIAVEQDKNTQEVFAQVKQIYKTPPIKYFGGFNFSQILPDPSKPSKRSFIEDLLFNKVTLADAGFIKQYGDCLGDIAARDLICAQKFNGLTVLPPLLTDEMIAQYTSALLAGTITSGWTFGAGAALQIPFAMQMAYRFNGIGVTQNVLYENQKLIANQFNSAIGKIQDSLSSTASALGKLQDVVNHNAQALNTLVKQLSSKFGAISSVLNDILSRLDPPEAEVQIDRLITGRLQSLQTYVTQQLIRAAEIRASANLAATKMSECVLGQSKRVDFCGKGYHLMSFPQSAPHGVVFLHVTYVPAQEKNFTTAPAICHDGKAHFPREGVFVSNGTHWFVTQRNFYEPQIITTDNTFVSGNCDVVIGIVNNTVYDPLQPELDSFKEELDKYFKNHTSPDVDLGDISGINASVVNIQKEIDRLNEVAKNLNESLIDLQELGKYEQYIKWPWYIWLGFIAGLIAIVMVTIMLCCMTSCCSCLKGCCSCGSCCKFDEDDSEPVLKGVKLHYT

SEQ ID NO: 227 - protein, 1255 aa, synthetic construct
QCVNLITRTQSYTNSFTRGVYYPDKVFRSSVLHSTQDLFLPFFSNVTWFHAISGTNGTKRFDNPVLPFNDGVYFASTEKSNIIRGWIFGTTLDSKTQSLLIVNNATNVVIKVCEFQFCNDPFLDVYYHKNNKSWMESEFRVYSSANNCTFEYVSQPFLMDLEGKQGNFKNLREFVFKNIDGYFKIYSKHTPINLGRDLPQGFSALEPLVDLPIGINITRFQTLLALHRSYLTPGDSSSGWTAGAAAYYVGYLQPRTFLLKYNENGTITDAVDCALDPLSETKCTLKSFTVEKGIYQTSNFRVQPTESIVRFPNITNLCPFDEVFNATTFASVYAWNRKRISNCVADYSVLYNFAPFFAFKCYGVSPTKLNDLCFTNVYADSFVIRGNEVSQIAPGQTGNIADYNYKLPDDFTGCVIAWNSNKLDSTVGGNYNYRYRLFRKSKLKPFERDISTEIYQAGNKPCNGVAGVNCYFPLQSYGFRPTYGVGHQPYRVVVLSFELLHAPATVCGPKKSTNLVKNKCVNFNFNGLTGTGVLTESNKKFLPFQQFGRDIADTTDAVRDPQTLEILDITPCSFGGVSVITPGTNTSNQVAVLYQGVNCTEVPVAIHADQLTPTWRVYSTGSNVFQTRAGCLIGAEYVNNSYECDIPIGAGICASYQTQTKSHQQAQSVASQSIIAYTMSLGAENSVAYSNNSIAIPTNFTISVTTEILPVSMTKTSVDCTMYICGDSTECSNLLLQYGSFCTQLKRALTGIAVEQDKNTQEVFAQVKQIYKTPPIKYFGGFNFSQILPDPSKPSKRSFIEDLLFNKVTLADAGFIKQYGDCLGDIAARDLICAQKFNGLTVLPPLLTDEMIAQYTSALLAGTITSGWTFGAGAALQIPFAMQMAYRFNGIGVTQNVLYENQKLIANQFNSAIGKIQDSLSSTASALGKLQDVVNHNAQALNTLVKQLSSKFGAISSVLNDILSRLDPPEAEVQIDRLITGRLQSLQTYVTQQLIRAAEIRASANLAATKMSECVLGQSKRVDFCGKGYHLMSFPQSAPHGVVFLHVTYVPAQEKNFTTAPAICHDGKAHFPREGVFVSNGTHWFVTQRNFYEPQIITTDNTFVSGNCDVVIGIVNNTVYDPLQPELDSFKEELDKYFKNHTSPDVDLGDISGINASVVNIQKEIDRLNEVAKNLNESLIDLQELGKYEQYIKWPWYIWLGFIAGLIAIVMVTIMLCCMTSCCSCLKGCCSCGSCCKFDEDDSEPVLKGVKLHYT

SEQ ID NO: 228 - protein, 1255 aa, synthetic construct
QCVNLITRTQSYTNSFTRGVYYPDKVFRSSVLHSTQDLFLPFFSNVTWFHAISGTNGTKRFDNPVLPFNDGVYFASTEKSNIIRGWIFGTTLDSKTQSLLIVNNATNVVIKVCEFQFCNDPFLDVYYHKNNKSWMESEFRVYSSANNCTFEYVSQPFLMDLEGKQGNFKNLREFVFKNIDGYFKIYSKHTPINLGRDLPQGFSALEPLVDLPIGINITRFQTLLALHRSYLTPGDSSSGWTAGAAAYYVGYLQPRTFLLKYNENGTITDAVDCALDPLSETKCTLKSFTVEKGIYQTSNFRVQPTESIVRFPNITNLCPFDEVFNATRFASVYAWNRKRISNCVADYSVLYNFAPFFAFKCYGVSPTKLNDLCFTNVYADSFVIRGNEVSQIAPGQTGNIADYNYKLPDDFTGCVIAWNSNKLDSTVGGNYNYRYRLFRKSKLKPFERDISTEIYQAGNKPCNGVAGVNCYFPLQSYGFRPTYGVGHQPYRVVVLSFELLHAPATVCGPKKSTNLVKNKCVNFNFNGLTGTGVLTESNKKFLPFQQFGRDIADTTDAVRDPQTLEILDITPCSFGGVSVITPGTNTSNQVAVLYQGVNCTEVPVAIHADQLTPTWRVYSTGSNVFQTRAGCLIGAEYVNNSYECDIPIGAGICASYQTQTKSHQQAQSVASQSIIAYTMSLGAENSVAYSNNSIAIPTNFTISVTTEILPVSMTKTSVDCTMYICGDSTECSNLLLQYGSFCTQLKRALTGIAVEQDKNTQEVFAQVKQIYKTPPIKYFGGFNFSQILPDPSKPSKRSFIEDLLFNKVTLADAGFIKQYGDCLGDIAARDLICAQKFNGLTVLPPLLTDEMIAQYTSALLAGTITSGWTFGAGAALQIPFAMQMAYRFNGIGVTQNVLYENQKLIANQFNSAIGKIQDSLSSTASALGKLQDVVNHNAQALNTLVKQLSSKFGAISSVLNDILSRLDPPEAEVQIDRLITGRLQSLQTYVTQQLIRAAEIRASANLAATKMSECVLGQSKRVDFCGKGYHLMSFPQSAPHGVVFLHVTYVPAQEKNFTTAPAICHDGKAHFPREGVFVSNGTHWFVTQRNFYEPQIITTDNTFVSGNCDVVIGIVNNTVYDPLQPELDSFKEELDKYFKNHTSPDVDLGDISGINASVVNIQKEIDRLNEVAKNLNESLIDLQELGKYEQYIKWPWYIWLGFIAGLIAIVMVTIMLCCMTSCCSCLKGCCSCGSCCKFDEDDSEPVLKGVKLHYT

SEQ ID NO: 229 - protein, 1267 aa, synthetic construct
MFVFLVLLPLVSSQCVNLITRTQSYTNSFTRGVYYPDKVFRSSVLHSTQDLFLPFFSNVTWFHAISGTNGTKRFDNPVLPFNDGVYFASTEKSNIIRGWIFGTTLDSKTQSLLIVNNATNVVIKVCEFQFCNDPFLDVYQKNNKSWMESEFRVYSSANNCTFEYVSQPFLMDLEGKEGNFKNLREFVFKNIDGYFKIYSKHTPINLERDLPQGFSALEPLVDLPIGINITRFQTLLALHRSYLTPGDSSSGWTAGAAAYYVGYLQPRTFLLKYNENGTITDAVDCALDPLSETKCTLKSFTVEKGIYQTSNFRVQPTESIVRFPNITNLCPFHEVFNATTFASVYAWNRKRISNCVADYSVIYNFAPFFAFKCYGVSPTKLNDLCFTNVYADSFVIRGNEVSQIAPGQTGNIADYNYKLPDDFTGCVIAWNSNKLDSKPSGNYNYLYRLFRKSKLKPFERDISTEIYQAGNKPCNGVAGSNCYSPLQSYGFRPTYGVGHQPYRVVVLSFELLHAPATVCGPKKSTNLVKNKCVNFNFNGLTGTGVLTESNKKFLPFQQFGRDIADTTDAVRDPQTLEILDITPCSFGGVSVITPGTNTSNQVAVLYQGVNCTEVPVAIHADQLTPTWRVYSTGSNVFQTRAGCLIGAEYVNNSYECDIPIGAGICASYQTQTKSHQQAQSVASQSIIAYTMSLGAENSVAYSNNSIAIPTNFTISVTTEILPVSMTKTSVDCTMYICGDSTECSNLLLQYGSFCTQLKRALTGIAVEQDKNTQEVFAQVKQIYKTPPIKYFGGFNFSQILPDPSKPSKRSFIEDLLFNKVTLADAGFIKQYGDCLGDIAARDLICAQKFNGLTVLPPLLTDEMIAQYTSALLAGTITSGWTFGAGAALQIPFAMQMAYRFNGIGVTQNVLYENQKLIANQFNSAIGKIQDSLSSTASALGKLQDVVNHNAQALNTLVKQLSSKFGAISSVLNDILSRLDPPEAEVQIDRLITGRLQSLQTYVTQQLIRAAEIRASANLAATKMSECVLGQSKRVDFCGKGYHLMSFPQSAPHGVVFLHVTYVPAQEKNFTTAPAICHDGKAHFPREGVFVSNGTHWFVTQRNFYEPQIITTDNTFVSGNCDVVIGIVNNTVYDPLQPELDSFKEELDKYFKNHTSPDVDLGDISGINASVVNIQKEIDRLNEVAKNLNESLIDLQELGKYEQYIKWPWYIWLGFIAGLIAIVMVTIMLCCMTSCCSCLKGCCSCGSCCKFDEDDSEPVLKGVKLHYT

SEQ ID NO: 230 - protein, 1269 aa, synthetic construct
MFVFLVLLPLVSSQCVNLITRTQSYTNSFTRGVYYPDKVFRSSVLHSTQDLFLPFFSNVTWFHAIHVSGTNGTKRFDNPALPFNDGVYFASTEKSNIIRGWIFGTTLDSKTQSLLIVNNATNVVIKVCEFQFCNDPFLDVYQKNNKSWMESEFRVYSSANNCTFEYVSQPFLMDLEGKEGNFKNLREFVFKNIDGYFKIYSKHTPINLERDLPQGFSALEPLVDLPIGINITRFQTLLALHRSYLTPVDSSSGWTAGAAAYYVGYLQPRTFLLKYNENGTITDAVDCALDPLSETKCTLKSFTVEKGIYQTSNFRVQPTESIVRFPNITNLCPFHEVFNATTFASVYAWNRKRISNCVADYSVIYNFAPFFAFKCYGVSPTKLNDLCFTNVYADSFVIRGNEVSQIAPGQTGNIADYNYKLPDDFTGCVIAWNSNKLDSKPSGNYNYLYRLFRKSKLKPFERDISTEIYQAGNKPCNGVAGSNCYSPLQSYGFRPTYGVGHQPYRVVVLSFELLHAPATVCGPKKSTNLVKNKCVNFNFNGLTGTGVLTESNKKFLPFQQFGRDIADTTDAVRDPQTLEILDITPCSFGGVSVITPGTNTSNQVAVLYQGVNCTEVPVAIHADQLTPTWRVYSTGSNVFQTRAGCLIGAEYVNNSYECDIPIGAGICASYQTQTKSHQQAQSVASQSIIAYTMSLGAENSVAYSNNSIAIPTNFTISVTTEILPVSMTKTSVDCTMYICGDSTECSNLLLQYGSFCTQLKRALTGIAVEQDKNTQEVFAQVKQIYKTPPIKYFGGFNFSQILPDPSKPSKRSFIEDLLFNKVTLADAGFIKQYGDCLGDIAARDLICAQKFNGLTVLPPLLTDEMIAQYTSALLAGTITSGWTFGAGAALQIPFAMQMAYRFNGIGVTQNVLYENQKLIANQFNSAIGKIQDSLSSTASALGKLQDVVNHNAQALNTLVKQLSSKFGAISSVLNDILSRLDPPEAEVQIDRLITGRLQSLQTYVTQQLIRAAEIRASANLAATKMSECVLGQSKRVDFCGKGYHLMSFPQSAPHGVVFLHVTYVPAQEKNFTTAPAICHDGKAHFPREGVFVSNGTHWFVTQRNFYEPQIITTDNTFVSGNCDVVIGIVNNTVYDPLQPELDSFKEELDKYFKNHTSPDVDLGDISGINASVVNIQKEIDRLNEVAKNLNESLIDLQELGKYEQYIKWPWYIWLGFIAGLIAIVMVTIMLCCMTSCCSCLKGCCSCGSCCKFDEDDSEPVLKGVKLHYT

SEQ ID NO: 231 - protein, 1267 aa, synthetic construct
MFVFLVLLPLVSSQCVNLITRTQSYTNSFTRGVYYPDKVFRSSVLHSTQDLFLPFFSNVTWFHAISGTNGTKRFDNPVLPFNDGVYFASTEKSNIIRGWIFGTTLDSKTQSLLIVNNATNVVIKVCEFQFCNDPFLDVYHKNNKSWMESEFRVYSSANNCTFEYVSQPFLMDLEGKQGNFKNLREFVFKNIDGYFKIYSKHTPINLGRDLPQGFSALEPLVDLPIGINITRFQTLLALHRSYLTPGDSSSGWTAGAAAYYVGYLQPRTFLLKYNENGTITDAVDCALDPLSETKCTLKSFTVEKGIYQTSNFRVQPTESIVRFPNITNLCPFDEVFNATTFASVYAWNRKRISNCVADYSVLYNFAPFFAFKCYGVSPTKLNDLCFTNVYADSFVIRGNEVSQIAPGQTGNIADYNYKLPDDFTGCVIAWNSNKLDSKVGGNYNYRYRLFRKSNLKPFERDISTEIYQAGNKPCNGVAGVNCYFPLQSYGFRPTYGVGHQPYRVVVLSFELLHAPATVCGPKKSTNLVKNKCVNFNFNGLTGTGVLTESNKKFLPFQQFGRDIADTTDAVRDPQTLEILDITPCSFGGVSVITPGTNTSNQVAVLYQGVNCTEVPVAIHADQLTPTWRVYSTGSNVFQTRAGCLIGAEYVNNSYECDIPIGAGICASYQTQTKSHQQAQSVASQSIIAYTMSLGAENSVAYSNNSIAIPTNFTISVTTEILPVSMTKTSVDCTMYICGDSTECSNLLLQYGSFCTQLKRALTGIAVEQDKNTQEVFAQVKQIYKTPPIKYFGGFNFSQILPDPSKPSKRSFIEDLLFNKVTLADAGFIKQYGDCLGDIAARDLICAQKFNGLTVLPPLLTDEMIAQYTSALLAGTITSGWTFGAGAALQIPFAMQMAYRFNGIGVTQNVLYENQKLIANQFNSAIGKIQDSLSSTASALGKLQDVVNHNAQALNTLVKQLSSKFGAISSVLNDILSRLDPPEAEVQIDRLITGRLQSLQTYVTQQLIRAAEIRASANLAATKMSECVLGQSKRVDFCGKGYHLMSFPQSAPHGVVFLHVTYVPAQEKNFTTAPAICHDGKAHFPREGVFVSNGTHWFVTQRNFYEPQIITTDNTFVSGNCDVVIGIVNNTVYDPLQPELDSFKEELDKYFKNHTSPDVDLGDISGINASVVNIQKEIDRLNEVAKNLNESLIDLQELGKYEQYIKWPWYIWLGFIAGLIAIVMVTIMLCCMTSCCSCLKGCCSCGSCCKFDEDDSEPVLKGVKLHYT

SEQ ID NO: 232 - protein, 1270 aa, synthetic construct
MFVFLVLLPLVSSQCVNLITRTQSYTNSFTRGVYYPDKVFRSSVLHSTQDLFLPFFSNVTWFHAIHVSGTNGTKRFDNPVLPFNDGVYFASTEKSNIIRGWIFGTTLDSKTQSLLIVNNATNVVIKVCEFQFCNDPFLDVYYHXNNKSRMESELRVYSSANNCTFEYVSQPFLMDLEGKQGNFKNLREFVFKNIDGYFKIYSKHTPVNLGRDLPQGFSALEPLVDLPIGINITRFQTLLALHRSYLTPGDSSSSWTAGAAAYYVGYLQPRTFLLKYNENGTITDAVDCALDPLSETKCTLKSFTVEKGIYQTSNFRVQPTESIVRFPNITNLCPFHEVFNATTFASVYAWNRTRISNCVADYSVLYNFAPFFAFKCYGVSPTKLNDLCFTNVYADSFVIRGNEVSQIAPGQTGNIADYNYKLPDDFTGCVIAWNSNKLDSKVSGNYNYLYRLFRKSKLKPFERDISTEIYQAGNKPCNGVAGFNCYSPLQSYGFRPTYGVGHQPYRVVVLSFELLHAPATVCGPKKSTNLVKNKCVNFNFNGLTGTGVLTESNKKFLPFQQFGRDIADTTDAVRDPQTLEILDITPCSFGGVSVITPGTNTSNQVAVLYQGVNCTEVPVAIHADQLTPTWRVYSTGSNVFQTRAGCLIGAEYVNNSYECDIPIGAGICASYQTQTKSHQQAQSVASQSIIAYTMSLGAENSVAYSNNSIAIPTNFTISVTTEILPVSMTKTSVDCTMYICGDSTECSNLLLQYGSFCTQLKRALTGIAVEQDKNTQEVFAQVKQIYKTPPIKYFGGFNFSQILPDPSKPSKRSFIEDLLFNKVTLADAGFIKQYGDCLGDIAARDLICAQKFNGLTVLPPLLTDEMIAQYTSALLAGTITSGWTFGAGAALQIPFAMQMAYRFNGIGVTQNVLYENQKLIANQFNSAIGKIQDSLSSTASALGKLQDVVNHNAQALNTLVKQLSSKFGAISSVLNDILSRLDPPEAEVQIDRLITGRLQSLQTYVTQQLIRAAEIRASANLAATKMSECVLGQSKRVDFCGKGYHLMSFPQSAPHGVVFLHVTYVPAQEKNFTTAPAICHDGKAHFPREGVFVSNGTHWFVTQRNFYEPQIITTDNTFVSGNCDVVIGIVNNTVYDPLQPELDSFKEELDKYFKNHTSPDVDLGDISGINASVVNIQKEIDRLNEVAKNLNESLIDLQELGKYEQYIKWPWYIWLGFIAGLIAIVMVTIMLCCMTSCCSCLKGCCSCGSCCKFDEDDSEPVLKGVKLHYT

SEQ ID NO: 233 - protein, 1254 aa, synthetic construct
QCVNLITRTQSYTNSFTRGVYYPDKVFRSSVLHSTQDLFLPFFSNVTWFHAISGTNGTKRFDNPVLPFNDGVYFASTEKSNIIRGWIFGTTLDSKTQSLLIVNNATNVVIKVCEFQFCNDPFLDVYQKNNKSWMESEFRVYSSANNCTFEYVSQPFLMDLEGKEGNFKNLREFVFKNIDGYFKIYSKHTPINLERDLPQGFSALEPLVDLPIGINITRFQTLLALHRSYLTPGDSSSGWTAGAAAYYVGYLQPRTFLLKYNENGTITDAVDCALDPLSETKCTLKSFTVEKGIYQTSNFRVQPTESIVRFPNITNLCPFHEVFNATTFASVYAWNRKRISNCVADYSVIYNFAPFFAFKCYGVSPTKLNDLCFTNVYADSFVIRGNEVSQIAPGQTGNIADYNYKLPDDFTGCVIAWNSNKLDSKPSGNYNYLYRLFRKSKLKPFERDISTEIYQAGNKPCNGVAGSNCYSPLQSYGFRPTYGVGHQPYRVVVLSFELLHAPATVCGPKKSTNLVKNKCVNFNFNGLTGTGVLTESNKKFLPFQQFGRDIADTTDAVRDPQTLEILDITPCSFGGVSVITPGTNTSNQVAVLYQGVNCTEVPVAIHADQLTPTWRVYSTGSNVFQTRAGCLIGAEYVNNSYECDIPIGAGICASYQTQTKSHQQAQSVASQSIIAYTMSLGAENSVAYSNNSIAIPTNFTISVTTEILPVSMTKTSVDCTMYICGDSTECSNLLLQYGSFCTQLKRALTGIAVEQDKNTQEVFAQVKQIYKTPPIKYFGGFNFSQILPDPSKPSKRSFIEDLLFNKVTLADAGFIKQYGDCLGDIAARDLICAQKFNGLTVLPPLLTDEMIAQYTSALLAGTITSGWTFGAGAALQIPFAMQMAYRFNGIGVTQNVLYENQKLIANQFNSAIGKIQDSLSSTASALGKLQDVVNHNAQALNTLVKQLSSKFGAISSVLNDILSRLDPPEAEVQIDRLITGRLQSLQTYVTQQLIRAAEIRASANLAATKMSECVLGQSKRVDFCGKGYHLMSFPQSAPHGVVFLHVTYVPAQEKNFTTAPAICHDGKAHFPREGVFVSNGTHWFVTQRNFYEPQIITTDNTFVSGNCDVVIGIVNNTVYDPLQPELDSFKEELDKYFKNHTSPDVDLGDISGINASVVNIQKEIDRLNEVAKNLNESLIDLQELGKYEQYIKWPWYIWLGFIAGLIAIVMVTIMLCCMTSCCSCLKGCCSCGSCCKFDEDDSEPVLKGVKLHYT

SEQ ID NO: 234 - protein, 1256 aa, synthetic construct
QCVNLITRTQSYTNSFTRGVYYPDKVFRSSVLHSTQDLFLPFFSNVTWFHAIHVSGTNGTKRFDNPALPFNDGVYFASTEKSNIIRGWIFGTTLDSKTQSLLIVNNATNVVIKVCEFQFCNDPFLDVYQKNNKSWMESEFRVYSSANNCTFEYVSQPFLMDLEGKEGNFKNLREFVFKNIDGYFKIYSKHTPINLERDLPQGFSALEPLVDLPIGINITRFQTLLALHRSYLTPVDSSSGWTAGAAAYYVGYLQPRTFLLKYNENGTITDAVDCALDPLSETKCTLKSFTVEKGIYQTSNFRVQPTESIVRFPNITNLCPFHEVFNATTFASVYAWNRKRISNCVADYSVIYNFAPFFAFKCYGVSPTKLNDLCFTNVYADSFVIRGNEVSQIAPGQTGNIADYNYKLPDDFTGCVIAWNSNKLDSKPSGNYNYLYRLFRKSKLKPFERDISTEIYQAGNKPCNGVAGSNCYSPLQSYGFRPTYGVGHQPYRVVVLSFELLHAPATVCGPKKSTNLVKNKCVNFNFNGLTGTGVLTESNKKFLPFQQFGRDIADTTDAVRDPQTLEILDITPCSFGGVSVITPGTNTSNQVAVLYQGVNCTEVPVAIHADQLTPTWRVYSTGSNVFQTRAGCLIGAEYVNNSYECDIPIGAGICASYQTQTKSHQQAQSVASQSIIAYTMSLGAENSVAYSNNSIAIPTNFTISVTTEILPVSMTKTSVDCTMYICGDSTECSNLLLQYGSFCTQLKRALTGIAVEQDKNTQEVFAQVKQIYKTPPIKYFGGFNFSQILPDPSKPSKRSFIEDLLFNKVTLADAGFIKQYGDCLGDIAARDLICAQKFNGLTVLPPLLTDEMIAQYTSALLAGTITSGWTFGAGAALQIPFAMQMAYRFNGIGVTQNVLYENQKLIANQFNSAIGKIQDSLSSTASALGKLQDVVNHNAQALNTLVKQLSSKFGAISSVLNDILSRLDPPEAEVQIDRLITGRLQSLQTYVTQQLIRAAEIRASANLAATKMSECVLGQSKRVDFCGKGYHLMSFPQSAPHGVVFLHVTYVPAQEKNFTTAPAICHDGKAHFPREGVFVSNGTHWFVTQRNFYEPQIITTDNTFVSGNCDVVIGIVNNTVYDPLQPELDSFKEELDKYFKNHTSPDVDLGDISGINASVVNIQKEIDRLNEVAKNLNESLIDLQELGKYEQYIKWPWYIWLGFIAGLIAIVMVTIMLCCMTSCCSCLKGCCSCGSCCKFDEDDSEPVLKGVKLHYT

SEQ ID NO: 235 - protein, 1254 aa, synthetic construct
QCVNLITRTQSYTNSFTRGVYYPDKVFRSSVLHSTQDLFLPFFSNVTWFHAISGTNGTKRFDNPVLPFNDGVYFASTEKSNIIRGWIFGTTLDSKTQSLLIVNNATNVVIKVCEFQFCNDPFLDVYHKNNKSWMESEFRVYSSANNCTFEYVSQPFLMDLEGKQGNFKNLREFVFKNIDGYFKIYSKHTPINLGRDLPQGFSALEPLVDLPIGINITRFQTLLALHRSYLTPGDSSSGWTAGAAAYYVGYLQPRTFLLKYNENGTITDAVDCALDPLSETKCTLKSFTVEKGIYQTSNFRVQPTESIVRFPNITNLCPFDEVFNATTFASVYAWNRKRISNCVADYSVLYNFAPFFAFKCYGVSPTKLNDLCFTNVYADSFVIRGNEVSQIAPGQTGNIADYNYKLPDDFTGCVIAWNSNKLDSKVGGNYNYRYRLFRKSNLKPFERDISTEIYQAGNKPCNGVAGVNCYFPLQSYGFRPTYGVGHQPYRVVVLSFELLHAPATVCGPKKSTNLVKNKCVNFNFNGLTGTGVLTESNKKFLPFQQFGRDIADTTDAVRDPQTLEILDITPCSFGGVSVITPGTNTSNQVAVLYQGVNCTEVPVAIHADQLTPTWRVYSTGSNVFQTRAGCLIGAEYVNNSYECDIPIGAGICASYQTQTKSHQQAQSVASQSIIAYTMSLGAENSVAYSNNSIAIPTNFTISVTTEILPVSMTKTSVDCTMYICGDSTECSNLLLQYGSFCTQLKRALTGIAVEQDKNTQEVFAQVKQIYKTPPIKYFGGFNFSQILPDPSKPSKRSFIEDLLFNKVTLADAGFIKQYGDCLGDIAARDLICAQKFNGLTVLPPLLTDEMIAQYTSALLAGTITSGWTFGAGAALQIPFAMQMAYRFNGIGVTQNVLYENQKLIANQFNSAIGKIQDSLSSTASALGKLQDVVNHNAQALNTLVKQLSSKFGAISSVLNDILSRLDPPEAEVQIDRLITGRLQSLQTYVTQQLIRAAEIRASANLAATKMSECVLGQSKRVDFCGKGYHLMSFPQSAPHGVVFLHVTYVPAQEKNFTTAPAICHDGKAHFPREGVFVSNGTHWFVTQRNFYEPQIITTDNTFVSGNCDVVIGIVNNTVYDPLQPELDSFKEELDKYFKNHTSPDVDLGDISGINASVVNIQKEIDRLNEVAKNLNESLIDLQELGKYEQYIKWPWYIWLGFIAGLIAIVMVTIMLCCMTSCCSCLKGCCSCGSCCKFDEDDSEPVLKGVKLHYT

SEQ ID NO: 236 - protein, 1257 aa, synthetic construct
QCVNLITRTQSYTNSFTRGVYYPDKVFRSSVLHSTQDLFLPFFSNVTWFHAIHVSGTNGTKRFDNPVLPFNDGVYFASTEKSNIIRGWIFGTTLDSKTQSLLIVNNATNVVIKVCEFQFCNDPFLDVYYHXNNKSRMESELRVYSSANNCTFEYVSQPFLMDLEGKQGNFKNLREFVFKNIDGYFKIYSKHTPVNLGRDLPQGFSALEPLVDLPIGINITRFQTLLALHRSYLTPGDSSSSWTAGAAAYYVGYLQPRTFLLKYNENGTITDAVDCALDPLSETKCTLKSFTVEKGIYQTSNFRVQPTESIVRFPNITNLCPFHEVFNATTFASVYAWNRTRISNCVADYSVLYNFAPFFAFKCYGVSPTKLNDLCFTNVYADSFVIRGNEVSQIAPGQTGNIADYNYKLPDDFTGCVIAWNSNKLDSKVSGNYNYLYRLFRKSKLKPFERDISTEIYQAGNKPCNGVAGFNCYSPLQSYGFRPTYGVGHQPYRVVVLSFELLHAPATVCGPKKSTNLVKNKCVNFNFNGLTGTGVLTESNKKFLPFQQFGRDIADTTDAVRDPQTLEILDITPCSFGGVSVITPGTNTSNQVAVLYQGVNCTEVPVAIHADQLTPTWRVYSTGSNVFQTRAGCLIGAEYVNNSYECDIPIGAGICASYQTQTKSHQQAQSVASQSIIAYTMSLGAENSVAYSNNSIAIPTNFTISVTTEILPVSMTKTSVDCTMYICGDSTECSNLLLQYGSFCTQLKRALTGIAVEQDKNTQEVFAQVKQIYKTPPIKYFGGFNFSQILPDPSKPSKRSFIEDLLFNKVTLADAGFIKQYGDCLGDIAARDLICAQKFNGLTVLPPLLTDEMIAQYTSALLAGTITSGWTFGAGAALQIPFAMQMAYRFNGIGVTQNVLYENQKLIANQFNSAIGKIQDSLSSTASALGKLQDVVNHNAQALNTLVKQLSSKFGAISSVLNDILSRLDPPEAEVQIDRLITGRLQSLQTYVTQQLIRAAEIRASANLAATKMSECVLGQSKRVDFCGKGYHLMSFPQSAPHGVVFLHVTYVPAQEKNFTTAPAICHDGKAHFPREGVFVSNGTHWFVTQRNFYEPQIITTDNTFVSGNCDVVIGIVNNTVYDPLQPELDSFKEELDKYFKNHTSPDVDLGDISGINASVVNIQKEIDRLNEVAKNLNESLIDLQELGKYEQYIKWPWYIWLGFIAGLIAIVMVTIMLCCMTSCCSCLKGCCSCGSCCKFDEDDSEPVLKGVKLHYT

SEQ ID NO: 237 - DNA, 3817 bp, synthetic construct
  source 1..3817: mol_type = other DNA
atgttcgtcttcctggtgctgctgcccctggtgtccagccagtgcgtgaacctgaccactaggactcagctgcctcccgcttacaccaactcattcactcgcggtgtgtactaccctgacaaggtcttccgttcttcagtgctgcactcaactcaggacctgttcctgcccttcttctccaacgtcacctggttccacgtcatctccggcaccaacggcactaagcgcttcgacaacccagtgctgcctttcaacgacggtgtctacttcgcttcaatcgagaagtccaacatcatccgtggatggatcttcggcaccactctggacagcaagactcagtctctgctgatcgtcaacaacgccaccaacgtggtcatcaaggtctgcgaattccagttctgcaacgacccattcctggaccacaagaacaacaagtcatggatggagtccgaattccgcgtctactccagcgctaacaactgcactttcgagtacgtgtcccagcctttcctgatggacctggaaggaaagcagggtaacttcaagaacctgagggagttcgtgttcaagaacatcgacggatacttcaagatctacagcaagcacaccccaatcatcgtgcgcgagcccgaggacctgcctcagggtttctctgctctggagccactggtggacctgcctatcggcatcaacatcacccgcttccagactctgctggctctgcaccgttcctacctgactccaggcgactcatcttctggatggactgctggagctgctgcttactacgtgggctacctgcagcctcgcaccttcctgctgaagtacaacgaaaacggaaccatcactgacgccgtcgactgcgctctggaccctctgtcagaaaccaagtgcactctgaagtccttcaccgtggagaagggcatctaccagacttcaaacttcagggtgcagcccaccgaatccatcgtcagattccctaacatcactaacctgtgccccttcgacgaggtcttcaacgccacccgcttcgcttccgtgtacgcctggaacaggaagagaatctcaaactgcgtcgctgactactccgtgctgtacaacctggcccctttcttcaccttcaagtgctacggcgtgtcaccaactaagctgaacgacctgtgcttcaccaacgtctacgccgactccttcgtgatcaggggagacgaggtcagacagatcgctcctggccagactggaaacatcgccgactacaactacaagctgcccgacgacttcaccggttgcgtcatcgcttggaacagcaacaagctggactctaaggtgagcggcaactacaactacctgtaccgcctgttccgtaagtcaaacctgaagccattcgagagggacatcagcactgaaatctaccaggccggaaacaagccttgcaacggtgtcgccggcttcaactgctacttccccctgaggtcctactctttcaggccaacttacggtgtgggccaccagccttacagagtggtcgtgctgagcttcgaactgctccacgctcctgctactgtgtgcggtccaaagaagtctaccaacctggtcaagaacaagtgcgtgaacttcaacttcaacggcctgaaaggaactggtgtcctgaccgagagcaacaagaagttcctgcccttccagcagttcggaagggacatcgctgacaccactgacgctgtgcgcgaccctcagaccctggaaatcctggacatcactccatgctcattcggaggtgtctccgtgatcacccctggcaccaacacttctaaccaggtcgctgtgctgtaccagggcgtcaactgcaccgaggtccctgtggccatccacgctgaccagctgacccccacttggcgcgtgtactccaccggcagcaacgtgttccagactcgtgctggttgcctgatcggcgccgagtacgtgaacaacagctacgaatgcgacatccccatcggcgctggaatctgcgcctcttaccagacccagactaagagccaccagcaggctcagtctgtggcctctcagtcaatcatcgcttacaccatgtcactgggcgctgaaaactccgtggcctactctaacaactcaatcgccatccccaccaacttcactatcagcgtgaccactgagatcctgccagtcagcatgaccaagacttctgtggactgcactatgtacatctgcggagacagcaccgaatgctctaacctgctgctgcagtacggctctttctgcacccagctgaagcgtgctctgactggaatcgccgtggagcaggacaagaacactcaggaagtcttcgctcaggtgaagcaaatctacaagaccccacctatcaagtacttcggcggattcaacttctcccagatcctgcctgacccctccaagccaagcaagcgctctttcatcgaggacctgctgttcaacaaggtcactctggccgacgctggattcatcaagcagtacggagactgcctgggtgacatcgccgctcgtgacctgatctgcgctcagaagttcaagggtctgaccgtgctgcccccactgctgactgacgaaatgatcgcccagtacactagcgccctgctggctggaaccatcacttctggttggaccttcggtgctggcgccgctctgcagatccctttcgctatgcagatggcctaccgtttcaacggaatcggtgtcacccagaacgtgctgtacgagaaccagaagctgatcgctaaccagttcaactcagccatcggaaagatccaggacagcctgagctctactgcctctgctctgggcaagctgcaggacgtcgtgaaccacaacgcccaggctctgaacaccctggtcaagcagctgtcatccaagttcggtgctatcagctctgtgctgaacgacatcttctcccgcctggaccctcccgaggccgaagtgcagatcgaccgcctgatcactggccgtctgcagtcactgcagacctacgtgactcagcagctgatcagggccgctgaaatcagagcctccgctaacctggccgctaccaagatgagcgagtgcgtcctgggtcaatctaagcgtgtggacttctgcggcaagggataccacctgatgtcattccctcagtctgctccccacggtgtggtgttcctgcacgtcacctacgtgccagcccaggagaagaacttcaccactgcccctgctatctgccacgacggcaaggctcacttccccagggaaggtgtcttcgtgagcaacggcacccactggttcgtcactcagagaaacttctacgagccacagatcatcaccactgacaacactttcgtgtctggaaactgcgacgtggtcatcggtatcgtcaacaacaccgtgtacgaccccctgcagccagagctggactcattcaaggaggaactggacaagtacttcaagaaccacacctcccctgacgtcgacctgggcgacatctcaggaatcaacgcttccgtcgtgaacatccagaaggagatcgaccgcctgaacgaagtggccaagaacctgaacgaaagcctgatcgacctgcaggagctgggcaagtacgaacagtacatcaagtggccttggtacatctggctgggtttcatcgctggcctcatcgctatcgtgatggtgaccatcatgctgtgctgcatgacttcatgctgctcctgcctgaagggctgctgcagctgcggatcttgctgcaagttcgacgaggacgactctgaacccgtcctgaagggcgtgaagctgcactacacctaattaa

SEQ ID NO: 238 - DNA, 3804 bp, synthetic construct
  source 1..3804: mol_type = other DNA
atgttcgtcttcctggtgctgctgcctctggtctccagccagtgcgtgaacctgatcaccaggactcagtcctacaccaacagcttcactagaggtgtgtactaccctgacaaggtcttccgctcttcagtgctgcactctactcaggacctgttcctgcccttcttctcaaacgtcacctggttccacgccatctccggcaccaacggcactaagagattcgacaacccagtgctgcctttcaacgacggcgtctacttcgcttctaccgagaagtcaaacatcatccgcggatggatcttcggcaccactctggactccaagactcagagcctgctgatcgtcaacaacgccaccaacgtggtcatcaaggtgtgcgaattccagttctgcaacgacccattcctggacgtgtaccagaagaacaacaagtcttggatggagtcagaattcagagtctactccagcgctaacaactgcactttcgagtacgtgtctcagcctttcctgatggacctggaaggaaaggagggtaacttcaagaacctgcgtgagttcgtcttcaagaacatcgacggttacttcaagatttactctaagcacaccccaatcaacctggagagggacctgcctcagggcttctcagctctggagccactggtggacctgcctatcggcatcaacatcaccaggttccagactctgctggctctgcacagaagctacctgactccaggagactcatcttctggatggactgctggagctgctgcttactacgtgggttacctgcagcctcgcaccttcctgctgaagtacaacgaaaacggcaccatcactgacgccgtcgactgcgctctggaccctctgtctgaaaccaagtgcactctgaagtcattcaccgtggagaagggcatctaccagacttccaacttccgcgtgcagcccaccgaaagcatcgtccgtttccctaacatcactaacctgtgccccttccacgaggtcttcaacgccaccaccttcgcttctgtgtacgcctggaaccgcaagcgtatctctaactgcgtcgccgactactcagtgatctacaacttcgctcccttcttcgccttcaagtgctacggagtgtcaccaactaagctgaacgacctgtgcttcaccaacgtctacgctgactctttcgtgatcaggggtaacgaggtctcacagatcgctccaggccagactggaaacatcgccgactacaactacaagctgcctgacgacttcaccggttgcgtcatcgcttggaactccaacaagctggacagcaagccctctggcaactacaactacctgtacaggctgttcagaaagtccaagctgaagcccttcgagcgtgacatcagcactgaaatctaccaggctggtaacaagccatgcaacggtgtcgccggctccaactgctactctcccctgcagtcctacggcttccgtccaacctacggtgtgggccaccagccttacagggtggtcgtgctgtccttcgaactcctccacgctccagctactgtgtgcggaccaaagaagagcaccaacctggtcaagaacaagtgcgtgaacttcaacttcaacggtctgaccggaactggtgtcctgaccgagtctaacaagaagttcctgcccttccagcagttcggtcgtgacatcgctgacactaccgacgccgtgagggacccccagaccctggaaatcctggacatcactccatgctctttcggaggtgtctcagtgatcactccaggaaccaacacttcaaaccaggtcgctgtgctgtaccagggtgtcaactgcaccgaagtccctgtggccatccacgctgaccagctgacccccacttggagagtgtacagcaccggctctaacgtcttccagactcgcgctggttgcctgatcggcgccgagtacgtgaacaactcttacgaatgcgacatccccatcggcgctggaatctgcgcctcataccagacccagactaagtcccaccagcaggctcagagcgtcgcctcacagtccatcatcgcttacaccatgtctctgggcgctgaaaactcagtggcctactcaaacaactccatcgccatccctaccaacttcactatctccgtgaccactgagatcctgcccgtctccatgaccaagactagcgtggactgcactatgtacatctgcggagactccaccgaatgcagcaacctgctgctgcagtacggtagcttctgcacccagctgaagcgtgctctgactggcatcgccgtggagcaggacaagaacactcaggaagtcttcgctcaggtgaagcaaatctacaagacccctcccatcaagtacttcggcggattcaacttctcccagatcctgcctgaccccagcaagccatctaagagatcattcatcgaggacctgctgttcaacaaggtcactctggccgacgctggtttcatcaagcagtacggagactgcctgggtgacatcgccgctcgcgacctgatctgcgctcagaagttcaacggcctgaccgtgctgccacctctgctgactgacgaaatgatcgcccagtacacttccgccctgctggctggaaccatcacttctggttggaccttcggtgctggtgctgctctgcagatccctttcgctatgcagatggcctacaggttcaacggaatcggtgtcacccagaacgtgctgtacgagaaccagaagctgatcgctaaccagttcaactccgccatcggcaagatccaggactccctgagctctactgccagcgctctgggaaagctgcaggacgtcgtgaaccacaacgcccaggctctgaacaccctggtcaagcagctgtcatccaagttcggagctatcagctctgtgctgaacgacatcctctcccgcctggaccctcctgaggctgaagtccagatcgacaggctgatcactggtagactgcagtctctgcagacctacgtgactcagcagctgatccgcgccgctgaaatccgtgcctcagctaacctggccgctaccaagatgtctgagtgcgtcctgggccagagcaagagggtggacttctgcggcaagggataccacctgatgtctttccctcagtcagctccccacggagtcgtgttcctgcacgtcacctacgtgccagcccaggagaagaacttcaccactgcccctgctatctgccacgacggcaaggctcacttcccccgtgaaggagtcttcgtgtccaacggcacccactggttcgtcactcagaggaacttctacgagccacagatcatcaccactgacaacactttcgtgagcggcaactgcgacgtggtcatcggtatcgtcaacaacaccgtgtacgaccccctgcagccagagctggactccttcaaggaagagctggacaagtacttcaagaaccacaccagcccagacgtcgacctgggcgacatctctggaatcaacgcttcagtcgtgaacatccagaaggagatcgaccgtctgaacgaagtggccaagaacctgaacgaatctctgatcgacctgcaggagctgggaaagtacgaacagtacatcaagtggccttggtacatctggctgggtttcatcgctggcctcatcgctatcgtgatggtgaccatcatgctgtgctgcatgacttcctgctgcagctgcctgaagggctgctgctcttgcggatcatgctgcaagttcgacgaggacgactcagaacccgtcctgaagggcgtgaagctgcactacacctaa

SEQ ID NO: 239 - DNA, 3810 bp, synthetic construct
  source 1..3810: mol_type = other DNA
atgttcgtcttcctggtgctgctgcctctggtctccagccagtgcgtgaacctgatcaccaggactcagtcctacaccaacagcttcactagaggtgtgtactaccctgacaaggtcttccgctcttcagtgctgcactctactcaggacctgttcctgcccttcttctcaaacgtcacctggttccacgccatccacgtgtccggcaccaacggcactaagagattcgacaacccagctctgcctttcaacgacggcgtctacttcgcttctaccgagaagtcaaacatcatccgcggatggatcttcggcaccactctggactccaagactcagagcctgctgatcgtcaacaacgccaccaacgtggtcatcaaggtgtgcgaattccagttctgcaacgacccattcctggacgtgtaccagaagaacaacaagtcttggatggagtcagaattcagagtctactccagcgctaacaactgcactttcgagtacgtgtctcagcctttcctgatggacctggaaggaaaggagggtaacttcaagaacctgcgtgagttcgtcttcaagaacatcgacggttacttcaagatttactctaagcacaccccaatcaacctggagagggacctgcctcagggcttctcagctctggagccactggtggacctgcctatcggcatcaacatcaccaggttccagactctgctggctctgcacagaagctacctgactccagtggactcatcttctggatggactgctggagctgctgcttactacgtgggttacctgcagcctcgcaccttcctgctgaagtacaacgaaaacggcaccatcactgacgccgtcgactgcgctctggaccctctgtctgaaaccaagtgcactctgaagtcattcaccgtggagaagggcatctaccagacttccaacttccgcgtgcagcccaccgaaagcatcgtccgtttccctaacatcactaacctgtgccccttccacgaggtcttcaacgccaccaccttcgcttctgtgtacgcctggaaccgcaagcgtatctctaactgcgtcgccgactactcagtgatctacaacttcgctcccttcttcgccttcaagtgctacggagtgtcaccaactaagctgaacgacctgtgcttcaccaacgtctacgctgactctttcgtgatcaggggtaacgaggtctcacagatcgctccaggccagactggaaacatcgccgactacaactacaagctgcctgacgacttcaccggttgcgtcatcgcttggaactccaacaagctggacagcaagccctctggcaactacaactacctgtacaggctgttcagaaagtccaagctgaagcccttcgagcgtgacatcagcactgaaatctaccaggctggtaacaagccatgcaacggtgtcgccggctccaactgctactctcccctgcagtcctacggcttccgtccaacctacggtgtgggccaccagccttacagggtggtcgtgctgtccttcgaactcctccacgctccagctactgtgtgcggaccaaagaagagcaccaacctggtcaagaacaagtgcgtgaacttcaacttcaacggtctgaccggaactggtgtcctgaccgagtctaacaagaagttcctgcccttccagcagttcggtcgtgacatcgctgacactaccgacgccgtgagggacccccagaccctggaaatcctggacatcactccatgctctttcggaggtgtctcagtgatcactccaggaaccaacacttcaaaccaggtcgctgtgctgtaccagggtgtcaactgcaccgaagtccctgtggccatccacgctgaccagctgacccccacttggagagtgtacagcaccggctctaacgtcttccagactcgcgctggttgcctgatcggcgccgagtacgtgaacaactcttacgaatgcgacatccccatcggcgctggaatctgcgcctcataccagacccagactaagtcccaccagcaggctcagagcgtcgcctcacagtccatcatcgcttacaccatgtctctgggcgctgaaaactcagtggcctactcaaacaactccatcgccatccctaccaacttcactatctccgtgaccactgagatcctgcccgtctccatgaccaagactagcgtggactgcactatgtacatctgcggagactccaccgaatgcagcaacctgctgctgcagtacggtagcttctgcacccagctgaagcgtgctctgactggcatcgccgtggagcaggacaagaacactcaggaagtcttcgctcaggtgaagcaaatctacaagacccctcccatcaagtacttcggcggattcaacttctcccagatcctgcctgaccccagcaagccatctaagagatcattcatcgaggacctgctgttcaacaaggtcactctggccgacgctggtttcatcaagcagtacggagactgcctgggtgacatcgccgctcgcgacctgatctgcgctcagaagttcaacggcctgaccgtgctgccacctctgctgactgacgaaatgatcgcccagtacacttccgccctgctggctggaaccatcacttctggttggaccttcggtgctggtgctgctctgcagatccctttcgctatgcagatggcctacaggttcaacggaatcggtgtcacccagaacgtgctgtacgagaaccagaagctgatcgctaaccagttcaactccgccatcggcaagatccaggactccctgagctctactgccagcgctctgggaaagctgcaggacgtcgtgaaccacaacgcccaggctctgaacaccctggtcaagcagctgtcatccaagttcggagctatcagctctgtgctgaacgacatcctctcccgcctggaccctcctgaggctgaagtccagatcgacaggctgatcactggtagactgcagtctctgcagacctacgtgactcagcagctgatccgcgccgctgaaatccgtgcctcagctaacctggccgctaccaagatgtctgagtgcgtcctgggccagagcaagagggtggacttctgcggcaagggataccacctgatgtctttccctcagtcagctccccacggagtcgtgttcctgcacgtcacctacgtgccagcccaggagaagaacttcaccactgcccctgctatctgccacgacggcaaggctcacttcccccgtgaaggagtcttcgtgtccaacggcacccactggttcgtcactcagaggaacttctacgagccacagatcatcaccactgacaacactttcgtgagcggcaactgcgacgtggtcatcggtatcgtcaacaacaccgtgtacgaccccctgcagccagagctggactccttcaaggaagagctggacaagtacttcaagaaccacaccagcccagacgtcgacctgggcgacatctctggaatcaacgcttcagtcgtgaacatccagaaggagatcgaccgtctgaacgaagtggccaagaacctgaacgaatctctgatcgacctgcaggagctgggaaagtacgaacagtacatcaagtggccttggtacatctggctgggtttcatcgctggcctcatcgctatcgtgatggtgaccatcatgctgtgctgcatgacttcctgctgcagctgcctgaagggctgctgctcttgcggatcatgctgcaagttcgacgaggacgactcagaacccgtcctgaagggcgtgaagctgcactacacctaa

SEQ ID NO: 240 - DNA, 3804 bp, synthetic construct
  source 1..3804: mol_type = other DNA
atgttcgtcttcctggtgctgctgcctctggtctccagccagtgcgtgaacctgatcaccaggactcagtcctacaccaacagcttcactagaggtgtgtactaccctgacaaggtcttccgctcttcagtgctgcactctactcaggacctgttcctgcccttcttctcaaacgtcacctggttccacgccatctccggcaccaacggcactaagagattcgacaacccagtgctgcctttcaacgacggcgtctacttcgcttctaccgagaagtcaaacatcatccgcggatggatcttcggcaccactctggactccaagactcagagcctgctgatcgtcaacaacgccaccaacgtggtcatcaaggtgtgcgaattccagttctgcaacgacccattcctggacgtgtaccacaagaacaacaagtcttggatggagtcagaattcagagtctactccagcgctaacaactgcactttcgagtacgtgtctcagcctttcctgatggacctggaaggaaagcagggtaacttcaagaacctgcgtgagttcgtcttcaagaacatcgacggttacttcaagatttactctaagcacaccccaatcaacctgggtagggacctgcctcagggcttctcagctctggagccactggtggacctgcctatcggcatcaacatcaccaggttccagactctgctggctctgcacagaagctacctgactccaggagactcatcttctggatggactgctggagctgctgcttactacgtgggttacctgcagcctcgcaccttcctgctgaagtacaacgaaaacggcaccatcactgacgccgtcgactgcgctctggaccctctgtctgaaaccaagtgcactctgaagtcattcaccgtggagaagggcatctaccagacttccaacttccgcgtgcagcccaccgaaagcatcgtccgtttccctaacatcactaacctgtgccccttcgacgaggtcttcaacgccaccaccttcgcttctgtgtacgcctggaaccgcaagcgtatctctaactgcgtcgccgactactcagtgctgtacaacttcgctcccttcttcgccttcaagtgctacggagtgtcaccaactaagctgaacgacctgtgcttcaccaacgtctacgctgactctttcgtgatcaggggtaacgaggtctcacagatcgctccaggccagactggaaacatcgccgactacaactacaagctgcctgacgacttcaccggttgcgtcatcgcttggaactccaacaagctggacagcaaagtgggtggcaactacaactaccgttacaggctgttcagaaagtccaacctgaagcccttcgagcgtgacatcagcactgaaatctaccaggctggtaacaagccatgcaacggtgtcgccggcgtcaactgctacttccccctgcagtcctacggcttccgtccaacctacggtgtgggccaccagccttacagggtggtcgtgctgtccttcgaactcctccacgctccagctactgtgtgcggaccaaagaagagcaccaacctggtcaagaacaagtgcgtgaacttcaacttcaacggtctgaccggaactggtgtcctgaccgagtctaacaagaagttcctgcccttccagcagttcggtcgtgacatcgctgacactaccgacgccgtgagggacccccagaccctggaaatcctggacatcactccatgctctttcggaggtgtctcagtgatcactccaggaaccaacacttcaaaccaggtcgctgtgctgtaccagggtgtcaactgcaccgaagtccctgtggccatccacgctgaccagctgacccccacttggagagtgtacagcaccggctctaacgtcttccagactcgcgctggttgcctgatcggcgccgagtacgtgaacaactcttacgaatgcgacatccccatcggcgctggaatctgcgcctcataccagacccagactaagtcccaccagcaggctcagagcgtcgcctcacagtccatcatcgcttacaccatgtctctgggcgctgaaaactcagtggcctactcaaacaactccatcgccatccctaccaacttcactatctccgtgaccactgagatcctgcccgtctccatgaccaagactagcgtggactgcactatgtacatctgcggagactccaccgaatgcagcaacctgctgctgcagtacggtagcttctgcacccagctgaagcgtgctctgactggcatcgccgtggagcaggacaagaacactcaggaagtcttcgctcaggtgaagcaaatctacaagacccctcccatcaagtacttcggcggattcaacttctcccagatcctgcctgaccccagcaagccatctaagagatcattcatcgaggacctgctgttcaacaaggtcactctggccgacgctggtttcatcaagcagtacggagactgcctgggtgacatcgccgctcgcgacctgatctgcgctcagaagttcaacggcctgaccgtgctgccacctctgctgactgacgaaatgatcgcccagtacacttccgccctgctggctggaaccatcacttctggttggaccttcggtgctggtgctgctctgcagatccctttcgctatgcagatggcctacaggttcaacggaatcggtgtcacccagaacgtgctgtacgagaaccagaagctgatcgctaaccagttcaactccgccatcggcaagatccaggactccctgagctctactgccagcgctctgggaaagctgcaggacgtcgtgaaccacaacgcccaggctctgaacaccctggtcaagcagctgtcatccaagttcggagctatcagctctgtgctgaacgacatcctctcccgcctggaccctcctgaggctgaagtccagatcgacaggctgatcactggtagactgcagtctctgcagacctacgtgactcagcagctgatccgcgccgctgaaatccgtgcctcagctaacctggccgctaccaagatgtctgagtgcgtcctgggccagagcaagagggtggacttctgcggcaagggataccacctgatgtctttccctcagtcagctccccacggagtcgtgttcctgcacgtcacctacgtgccagcccaggagaagaacttcaccactgcccctgctatctgccacgacggcaaggctcacttcccccgtgaaggagtcttcgtgtccaacggcacccactggttcgtcactcagaggaacttctacgagccacagatcatcaccactgacaacactttcgtgagcggcaactgcgacgtggtcatcggtatcgtcaacaacaccgtgtacgaccccctgcagccagagctggactccttcaaggaagagctggacaagtacttcaagaaccacaccagcccagacgtcgacctgggcgacatctctggaatcaacgcttcagtcgtgaacatccagaaggagatcgaccgtctgaacgaagtggccaagaacctgaacgaatctctgatcgacctgcaggagctgggaaagtacgaacagtacatcaagtggccttggtacatctggctgggtttcatcgctggcctcatcgctatcgtgatggtgaccatcatgctgtgctgcatgacttcctgctgcagctgcctgaagggctgctgctcttgcggatcatgctgcaagttcgacgaggacgactcagaacccgtcctgaagggcgtgaagctgcactacacctaa

SEQ ID NO: 241 - DNA, 3813 bp, synthetic construct
  source 1..3813: mol_type = other DNA
atgttcgtcttcctggtgctgctgcctctggtctccagccagtgcgtgaacctgatcaccaggactcagtcctacaccaacagcttcactagaggtgtgtactaccctgacaaggtcttccgctcttcagtgctgcactctactcaggacctgttcctgcccttcttctcaaacgtcacctggttccacgccatccacgtgtccggcaccaacggcactaagagattcgacaacccagtgctgcctttcaacgacggcgtctacttcgcttctaccgagaagtcaaacatcatccgcggatggatcttcggcaccactctggactccaagactcagagcctgctgatcgtcaacaacgccaccaacgtggtcatcaaggtgtgcgaattccagttctgcaacgacccattcctggacgtgtactaccacgagaacaacaagtctcgcatggagtcagaattgagagtctactccagcgctaacaactgcactttcgagtacgtgtctcagcctttcctgatggacctggaaggaaagcagggtaacttcaagaacctgcgtgagttcgtcttcaagaacatcgacggttacttcaagatttactctaagcacaccccagtgaacctgggtagggacctgcctcagggcttctcagctctggagccactggtggacctgcctatcggcatcaacatcaccaggttccagactctgctggctctgcacagaagctacctgactccaggagactcatcttctagctggactgctggagctgctgcttactacgtgggttacctgcagcctcgcaccttcctgctgaagtacaacgaaaacggcaccatcactgacgccgtcgactgcgctctggaccctctgtctgaaaccaagtgcactctgaagtcattcaccgtggagaagggcatctaccagacttccaacttccgcgtgcagcccaccgaaagcatcgtccgtttccctaacatcactaacctgtgccccttccacgaggtcttcaacgccaccaccttcgcttctgtgtacgcctggaaccgcacccgtatctctaactgcgtcgccgactactcagtgctgtacaacttcgctcccttcttcgccttcaagtgctacggagtgtcaccaactaagctgaacgacctgtgcttcaccaacgtctacgctgactctttcgtgatcaggggtaacgaggtctcacagatcgctccaggccagactggaaacatcgccgactacaactacaagctgcctgacgacttcaccggttgcgtcatcgcttggaactccaacaagctggacagcaaagtgagcggcaactacaactacttgtacaggctgttcagaaagtccaaactgaagcccttcgagcgtgacatcagcactgaaatctaccaggctggtaacaagccatgcaacggtgtcgccggctttaactgctactctcccctgcagtcctacggcttccgtccaacctacggtgtgggccaccagccttacagggtggtcgtgctgtccttcgaactcctccacgctccagctactgtgtgcggaccaaagaagagcaccaacctggtcaagaacaagtgcgtgaacttcaacttcaacggtctgaccggaactggtgtcctgaccgagtctaacaagaagttcctgcccttccagcagttcggtcgtgacatcgctgacactaccgacgccgtgagggacccccagaccctggaaatcctggacatcactccatgctctttcggaggtgtctcagtgatcactccaggaaccaacacttcaaaccaggtcgctgtgctgtaccagggtgtcaactgcaccgaagtccctgtggccatccacgctgaccagctgacccccacttggagagtgtacagcaccggctctaacgtcttccagactcgcgctggttgcctgatcggcgccgagtacgtgaacaactcttacgaatgcgacatccccatcggcgctggaatctgcgcctcataccagacccagactaagtcccaccagcaggctcagagcgtcgcctcacagtccatcatcgcttacaccatgtctctgggcgctgaaaactcagtggcctactcaaacaactccatcgccatccctaccaacttcactatctccgtgaccactgagatcctgcccgtctccatgaccaagactagcgtggactgcactatgtacatctgcggagactccaccgaatgcagcaacctgctgctgcagtacggtagcttctgcacccagctgaagcgtgctctgactggcatcgccgtggagcaggacaagaacactcaggaagtcttcgctcaggtgaagcaaatctacaagacccctcccatcaagtacttcggcggattcaacttctcccagatcctgcctgaccccagcaagccatctaagagatcattcatcgaggacctgctgttcaacaaggtcactctggccgacgctggtttcatcaagcagtacggagactgcctgggtgacatcgccgctcgcgacctgatctgcgctcagaagttcaacggcctgaccgtgctgccacctctgctgactgacgaaatgatcgcccagtacacttccgccctgctggctggaaccatcacttctggttggaccttcggtgctggtgctgctctgcagatccctttcgctatgcagatggcctacaggttcaacggaatcggtgtcacccagaacgtgctgtacgagaaccagaagctgatcgctaaccagttcaactccgccatcggcaagatccaggactccctgagctctactgccagcgctctgggaaagctgcaggacgtcgtgaaccacaacgcccaggctctgaacaccctggtcaagcagctgtcatccaagttcggagctatcagctctgtgctgaacgacatcctctcccgcctggaccctcctgaggctgaagtccagatcgacaggctgatcactggtagactgcagtctctgcagacctacgtgactcagcagctgatccgcgccgctgaaatccgtgcctcagctaacctggccgctaccaagatgtctgagtgcgtcctgggccagagcaagagggtggacttctgcggcaagggataccacctgatgtctttccctcagtcagctccccacggagtcgtgttcctgcacgtcacctacgtgccagcccaggagaagaacttcaccactgcccctgctatctgccacgacggcaaggctcacttcccccgtgaaggagtcttcgtgtccaacggcacccactggttcgtcactcagaggaacttctacgagccacagatcatcaccactgacaacactttcgtgagcggcaactgcgacgtggtcatcggtatcgtcaacaacaccgtgtacgaccccctgcagccagagctggactccttcaaggaagagctggacaagtacttcaagaaccacaccagcccagacgtcgacctgggcgacatctctggaatcaacgcttcagtcgtgaacatccagaaggagatcgaccgtctgaacgaagtggccaagaacctgaacgaatctctgatcgacctgcaggagctgggaaagtacgaacagtacatcaagtggccttggtacatctggctgggtttcatcgctggcctcatcgctatcgtgatggtgaccatcatgctgtgctgcatgacttcctgctgcagctgcctgaagggctgctgctcttgcggatcatgctgcaagttcgacgaggacgactcagaacccgtcctgaagggcgtgaagctgcactacacctaa

SEQ ID NO: 242 - protein, 1270 aa, synthetic construct; identical to SEQ ID NO: 160

SEQ ID NO: 243 - protein, 1270 aa, synthetic construct; identical to SEQ ID NO: 160

SEQ ID NO: 244 - protein, 1270 aa, synthetic construct; identical to SEQ ID NO: 205

SEQ ID NO: 245 - protein, 1269 aa, synthetic construct
MFVFLVLLPLVSSQCVNLITRTQSYTNSFTRGVYYPDKVFRSSVLHSTQDLFLPFFSNVTWFHAIHVSGTNGTKRFDNPALPFNDGVYFASTEKSNIIRGWIFGTTLDSKTQSLLIVNNATNVVIKVCEFQFCNDPFLDVYQKNNKSWMESEFRVYSSANNCTFEYVSQPFLMDLVGKEGNFKNLREFVFKNIDGYFKIYSKHTPINLERDLPQGFSALEPLVDLPIGINITRFQTLLALHRSYLTPVDSSSGWTAGAAAYYVGYLQPRTFLLKYNENGTITDAVDCALDPLSETKCTLKSFTVEKGIYQTSNFRVQPTESIVRFPNITNLCPFHEVFNATTFASVYAWNRKRISNCVADYSVIYNFAPFFAFKCYGVSPTKLNDLCFTNVYADSFVIRGNEVSQIAPGQTGNIADYNYKLPDDFTGCVIAWNSNKLDSKPSGNYNYLYRLFRKSKLKPFERDISTEIYQAGNRPCNGVAGPNCYSPLQSYGFRPTYGVGHQPYRVVVLSFELLHAPATVCGPKKSTNLVKNKCVNFNFNGLTGTGVLTESNKKFLPFQQFGRDIADTTDAVRDPQTLEILDITPCSFGGVSVITPGTNTSNQVAVLYQGVNCTEVPVAIHADQLTPTWRVYSTGSNVFQTRAGCLIGAEYVNNSYECDIPIGAGICASYQTQTKSHRRARSVASQSIIAYTMSLGAENSVAYSNNSIAIPTNFTISVTTEILPVSMTKTSVDCTMYICGDSTECSNLLLQYGSFCTQLKRALTGIAVEQDKNTQEVFAQVKQIYKTPPIKYFGGFNFSQILPDPSKPSKRSFIEDLLFNKVTLADAGFIKQYGDCLGDIAARDLICAQKFNGLTVLPPLLTDEMIAQYTSALLAGTITSGWTFGAGAALQIPFAMQMAYRFNGIGVTQNVLYENQKLIANQFNSAIGKIQDSLSSTASALGKLQDVVNHNAQALNTLVKQLSSKFGAISSVLNDILSRLDKVEAEVQIDRLITGRLQSLQTYVTQQLIRAAEIRASANLAATKMSECVLGQSKRVDFCGKGYHLMSFPQSAPHGVVFLHVTYVPAQEKNFTTAPAICHDGKAHFPREGVFVSNGTHWFVTQRNFYEPQIITTDNTFVSGNCDVVIGIVNNTVYDPLQPELDSFKEELDKYFKNHTSPDVDLGDISGINASVVNIQKEIDRLNEVAKNLNESLIDLQELGKYEQYIKWPWYIWLGFIAGLIAIVMVTIMLCCMTSCCSCLKGCCSCGSCCKFDEDDSEPVLKGVKLHYT

SEQ ID NO: 246 - protein, 1269 aa, synthetic construct
MFVFLVLLPLVSSQCVNLITRTQSYTNSFTRGVYYPDKVFRSSVLHSTQDLFLPFFSNVTWFHAIHVSGTNGTKRFDNPALPFNDGVYFASTEKSNIIRGWIFGTTLDSKTQSLLIVNNATNVVIKVCEFQFCNDPFLDVYQKNNKSWMESEFRVYSSANNCTFEYVSQPFLMDLVGKEGNFKNLREFVFKNIDGYFKIYSKHTPINLERDLPQGFSALEPLVDLPIGINITRFQTLLALHRSYLTPVDSSSGWTAGAAAYYVGYLQPRTFLLKYNENGTITDAVDCALDPLSETKCTLKSFTVEKGIYQTSNFRVQPTESIVRFPNITNLCPFHEVFNATTFASVYAWNRKRISNCVADYSVIYNFAPFFAFKCYGVSPTKLNDLCFTNVYADSFVIRGNEVSQIAPGQTGNIADYNYKLPDDFTGCVIAWNSNKLDSKPSGNYNYLYRLFRKSKLKPFERDISTEIYQAGNRPCNGVAGPNCYSPLQSYGFRPTYGVGHQPYRVVVLSFELLHASATVCGPKKSTNLVKNKCVNFNFNGLTGTGVLTESNKKFLPFQQFGRDIADTTDAVRDPQTLEILDITPCSFGGVSVITPGTNTSNQVAVLYQGVNCTEVPVAIHADQLTPTWRVYSTGSNVFQTRAGCLIGAEYVNNSYECDIPIGAGICASYQTQTKSHRRARSVASQSIIAYTMSLGAENSVAYSNNSIAIPTNFTISVTTEILPVSMTKTSVDCTMYICGDSTECSNLLLQYGSFCTQLKRALTGIAVEQDKNTQEVFAQVKQIYKTPPIKYFGGFNFSQILPDPSKPSKRSFIEDLLFNKVTLADAGFIKQYGDCLGDIAARDLICAQKFNGLTVLPPLLTDEMIAQYTSALLAGTITSGWTFGAGAALQIPFAMQMAYRFNGIGVTQNVLYENQKLIANQFNSAIGKIQDSLSSTASALGKLQDVVNHNAQALNTLVKQLSSKFGAISSVLNDILSRLDKVEAEVQIDRLITGRLQSLQTYVTQQLIRAAEIRASANLAATKMSECVLGQSKRVDFCGKGYHLMSFPQSAPHGVVFLHVTYVPAQEKNFTTAPAICHDGKAHFPREGVFVSNGTHWFVTQRNFYEPQIITTDNTFVSGNCDVVIGIVNNTVYDPLQPELDSFKEELDKYFKNHTSPDVDLGDISGINASVVNIQKEIDRLNEVAKNLNESLIDLQELGKYEQYIKWPWYIWLGFIAGLIAIVMVTIMLCCMTSCCSCLKGCCSCGSCCKFDEDDSEPVLKGVKLHYT

SEQ ID NO: 247 - protein, 1269 aa, synthetic construct
MFVFLVLLPLVSSQCVNLITRTQSYTNSFTRGVYYPDKVFRSSVLHSTQDLFLPFFSNVTWFHAIHVSGTNGTKRFDNPALPFNDGVYFASTEKSNIIRGWIFGTTLDSKTQSLLIVNNATNVVIKVCEFQFCNDPFLDVYQKNNKSWMESEFRVYSSANNCTFEYVSQPFLMDLVGKEGNFKNLREFVFKNIDGYFKIYSKHTPINLERDLPQGFSALEPLVDLPIGINITRFQTLLALHRSYLTPVDSSSGWTAGAAAYYVGYLQPRTFLLKYNENGTITDAVDCALDPLSETKCTLKSFTVEKGIYQTSNFRVQPTESIVRFPNITNLCPFHEVFNATTFASVYAWNRKRISNCVADYSVIYNFAPFFAFKCYGVSPTKLNDLCFTNVYADSFVIRGNEVSQIAPGQTGNIADYNYKLPDDFTGCVIAWNSNKLDSTPSGNYNYLYRLFRKSKLKPFERDISTEIYQAGNRPCNGVAGPNCYSPLQSYGFRPTYGVGHQPYRVVVLSFELLHAPATVCGPKKSTNLVKNKCVNFNFNGLTGTGVLTESNKKFLPFQQFGRDIADTTDAVRDPQTLEILDITPCSFGGVSVITPGTNTSNQVAVLYQGVNCTEVPVAIHADQLTPTWRVYSTGSNVFQTRAGCLIGAEYVNNSYECDIPIGAGICASYQTQTKSHRRARSVASQSIIAYTMSLGAENSVAYSNNSIAIPTNFTISVTTEILPVSMTKTSVDCTMYICGDSTECSNLLLQYGSFCTQLKRALTGIAVEQDKNTQEVFAQVKQIYKTPPIKYFGGFNFSQILPDPSKPSKRSFIEDLLFNKVTLADAGFIKQYGDCLGDIAARDLICAQKFNGLTVLPPLLTDEMIAQYTSALLAGTITSGWTFGAGAALQIPFAMQMAYRFNGIGVTQNVLYENQKLIANQFNSAIGKIQDSLSSTASALGKLQDVVNHNAQALNTLVKQLSSKFGAISSVLNDILSRLDKVEAEVQIDRLITGRLQSLQTYVTQQLIRAAEIRASANLAATKMSECVLGQSKRVDFCGKGYHLMSFPQSAPHGVVFLHVTYVPAQEKNFTTAPAICHDGKAHFPREGVFVSNGTHWFVTQRNFYEPQIITTDNTFVSGNCDVVIGIVNNTVYDPLQPELDSFKEELDKYFKNHTSPDVDLGDISGINASVVNIQKEIDRLNEVAKNLNESLIDLQELGKYEQYIKWPWYIWLGFIAGLIAIVMVTIMLCCMTSCCSCLKGCCSCGSCCKFDEDDSEPVLKGVKLHYT

SEQ ID NO: 248 - protein, 1269 aa, synthetic construct
MFVFLVLLPLVSSQCVNLITRTQSYTNSFTRGVYYPDKVFRSSVLHSTQDLFLPFFSNVTWFHAIHVSGTNGTKRFDNPALPFNDGVYFASTEKSNIIRGWIFGTTLDSKTQSLLIVNNATNVVIKVCEFQFCNDPFLDVYQKNNKSWMESEFRVYSSANNCTFEYVSQPFLMDLVGKEGNFKNLREFVFKNIDGYFKIYSKHTPINLERDLPQGFSALEPLVDLPIGINITRFQTLLALHRSYLTPVDSSSGWTAGAAAYYVGYLQPRTFLLKYNENGTITDAVDCALDPLSETKCTLKSFTVEKGIYQTSNFRVQPTESIVRFPNITNLCPFHEVFNATTFASVYAWNRKRISNCVADYSVIYNFAPFFAFKCYGVSPTKLNDLCFTNVYADSFVIRGNEVSQIAPGQTGNIADYNYKLPDDFTGCVIAWNSNKLDSKPSGNYNYLYRLFRKSKLKPFERDISTEIYQAGNRPCNGVAGSNCYSPLQSYGFRPTYGVGHQPYRVVVLSFELLHAPATVCGPKKSTNLVKNKCVNFNFNGLTGTGVLTESNKKFLPFQQFGRDIADTTDAVRDPQTLEILDITPCSFGGVSVITPGTNTSNQVAVLYQGVNCTEVPVAIHADQLTPTWRVYSTGSNVFQTRAGCLIGAEYVNNSYECDIPIGAGICASYQTQTKSHRRARSVASQSIIAYTMSLGAENSVAYSNNSIAIPTNFTISVTTEILPVSMTKTSVDCTMYICGDSTECSNLLLQYGSFCTQLKRALTGIAVEQDKNTQEVFAQVKQIYKTPPIKYFGGFNFSQILPDPSKPSKRSFIEDLLFNKVTLADAGFIKQYGDCLGDIAARDLICAQKFNGLTVLPPLLTDEMIAQYTSALLAGTITSGWTFGAGAALQIPFAMQMAYRFNGIGVTQNVLYENQKLIANQFNSAIGKIQDSLSSTASALGKLQDVVNHNAQALNTLVKQLSSKFGAISSVLNDILSRLDKVEAEVQIDRLITGRLQSLQTYVTQQLIRAAEIRASANLAATKMSECVLGQSKRVDFCGKGYHLMSFPQSAPHGVVFLHVTYVPAQEKNFTTAPAICHDGKAHFPREGVFVSNGTHWFVTQRNFYEPQIITTDNTFVSGNCDVVIGIVNNTVYDPLQPELDSFKEELDKYFKNHTSPDVDLGDISGINASVVNIQKEIDRLNEVAKNLNESLIDLQELGKYEQYIKWPWYIWLGFIAGLIAIVMVTIMLCCMTSCCSCLKGCCSCGSCCKFDEDDSEPVLKGVKLHYT

SEQ ID NO: 249 - protein, 1269 aa, synthetic construct
MFVFLVLLPLVSSQCVNLITRTQSYTNSFTRGVYYPDKVFRSSVLHSTQDLFLPFFSNVTWFHAIHVSGTNGTKRFDNPALPFNDGVYFASTEKSNIIRGWIFGTTLDSKTQSLLIVNNATNVVIKVCEFQFCNDPFLDVYQKNNKSWMESEFRVYSSANNCTFEYVSQPFLMDLVGKEGNFKNLREFVFKNIDGYFKIYSKHTPINLERDLPQGFSALEPLVDLPIGINITRFQTLLALHRSYLTPVDSSSGWTAGAAAYYVGYLQPRTFLLKYNENGTITDAVDCALDPLSETKCTLKSFTVEKGIYQTSNFRVQPTESIVRFPNITNLCPFHEVFNATTFASVYAWNRKRISNCVADYSVIYNFAPFFAFKCYGVSPTKLNDLCFTNVYADSFVIRGNEVSQIAPGQTGNIADYNYKLPDDFTGCVIAWNSNKLDSKPSGNYNYLYRLFRKSKLKPFERDISTEIYQAGNKPCNGVAGPNCYSPLQSYGFRPTYGVGHQPYRVVVLSFELLHAPATVCGPKKSTNLVKNKCVNFNFNGLTGTGVLTESNKKFLPFQQFGRDIADTTDAVRDPQTLEILDITPCSFGGVSVITPGTNTSNQVAVLYQGVNCTEVPVAIHADQLTPTWRVYSTGSNVFQTRAGCLIGAEYVNNSYECDIPIGAGICASYQTQTKSHRRARSVASQSIIAYTMSLGAENSVAYSNNSIAIPTNFTISVTTEILPVSMTKTSVDCTMYICGDSTECSNLLLQYGSFCTQLKRALTGIAVEQDKNTQEVFAQVKQIYKTPPIKYFGGFNFSQILPDPSKPSKRSFIEDLLFNKVTLADAGFIKQYGDCLGDIAARDLICAQKFNGLTVLPPLLTDEMIAQYTSALLAGTITSGWTFGAGAALQIPFAMQMAYRFNGIGVTQNVLYENQKLIANQFNSAIGKIQDSLSSTASALGKLQDVVNHNAQALNTLVKQLSSKFGAISSVLNDILSRLDKVEAEVQIDRLITGRLQSLQTYVTQQLIRAAEIRASANLAATKMSECVLGQSKRVDFCGKGYHLMSFPQSAPHGVVFLHVTYVPAQEKNFTTAPAICHDGKAHFPREGVFVSNGTHWFVTQRNFYEPQIITTDNTFVSGNCDVVIGIVNNTVYDPLQPELDSFKEELDKYFKNHTSPDVDLGDISGINASVVNIQKEIDRLNEVAKNLNESLIDLQELGKYEQYIKWPWYIWLGFIAGLIAIVMVTIMLCCMTSCCSCLKGCCSCGSCCKFDEDDSEPVLKGVKLHYT

SEQ ID NO: 250 - protein, 1269 aa, synthetic construct
MFVFLVLLPLVSSQCVNLITRTQSYTNSFTRGVYYPDKVFRSSVLHSTQDLFLPFFSNVTWFHAIHVSGTNGTKRFDNPALPFNDGVYFASTEKSNIIRGWIFGTTLDSKTQSLLIVNNATNVVIKVCEFQFCNDPFLDVYQKNNKSWMESEFRVYSSANNCTFEYVSQPFLMDLVGKEGNFKNLREFVFKNIDGYFKIYSKHTPINLERDLPQGFSALEPLVDLPIGINITRFQTLLALHRSYLTPVDSSSGWTAGAAAYYVGYLQPRTFLLKYNENGTITDAVDCALDPLSETKCTLKSFTVEKGIYQTSNFRVQPTESIVRFPNITNLCPFHEVFNATTFASVYAWNRKRISNCVADYSVIYNFAPFFAFKCYGVSPTKLNDLCFTNVYADSFVIRGNEVSQIAPGQTGNIADYNYKLPDDFTGCVIAWNSNKLDSKPSGNYNYLYRLFRKSKLKPFERDISTEIYQAGNRPCNGVAGPNCYSPLQSYGFRPTYGVGHQPYRVVVLSFELLHAPATVCGPKKSTNLVKNKCVNFNFNGLTGTGVLTESNKKFLPFQQFGRDIADTTDAVRDPQTLEILDITPCSFGGVSVITPGTNTSNQVAVLYQGVNCTEVPVAIHADQLTPTWRVYSTGSNVFQTRAGCLIGAEYVNNSYECDIPIGAGICASYQTQTKSHQQAQSVASQSIIAYTMSLGAENSVAYSNNSIAIPTNFTISVTTEILPVSMTKTSVDCTMYICGDSTECSNLLLQYGSFCTQLKRALTGIAVEQDKNTQEVFAQVKQIYKTPPIKYFGGFNFSQILPDPSKPSKRSFIEDLLFNKVTLADAGFIKQYGDCLGDIAARDLICAQKFNGLTVLPPLLTDEMIAQYTSALLAGTITSGWTFGAGAALQIPFAMQMAYRFNGIGVTQNVLYENQKLIANQFNSAIGKIQDSLSSTASALGKLQDVVNHNAQALNTLVKQLSSKFGAISSVLNDILSRLDPPEAEVQIDRLITGRLQSLQTYVTQQLIRAAEIRASANLAATKMSECVLGQSKRVDFCGKGYHLMSFPQSAPHGVVFLHVTYVPAQEKNFTTAPAICHDGKAHFPREGVFVSNGTHWFVTQRNFYEPQIITTDNTFVSGNCDVVIGIVNNTVYDPLQPELDSFKEELDKYFKNHTSPDVDLGDISGINASVVNIQKEIDRLNEVAKNLNESLIDLQELGKYEQYIKWPWYIWLGFIAGLIAIVMVTIMLCCMTSCCSCLKGCCSCGSCCKFDEDDSEPVLKGVKLHYT

SEQ ID NO: 251 - protein, 1269 aa, synthetic construct
MFVFLVLLPLVSSQCVNLITRTQSYTNSFTRGVYYPDKVFRSSVLHSTQDLFLPFFSNVTWFHAIHVSGTNGTKRFDNPALPFNDGVYFASTEKSNIIRGWIFGTTLDSKTQSLLIVNNATNVVIKVCEFQFCNDPFLDVYQKNNKSWMESEFRVYSSANNCTFEYVSQPFLMDLVGKEGNFKNLREFVFKNIDGYFKIYSKHTPINLERDLPQGFSALEPLVDLPIGINITRFQTLLALHRSYLTPVDSSSGWTAGAAAYYVGYLQPRTFLLKYNENGTITDAVDCALDPLSETKCTLKSFTVEKGIYQTSNFRVQPTESIVRFPNITNLCPFHEVFNATTFASVYAWNRKRISNCVADYSVIYNFAPFFAFKCYGVSPTKLNDLCFTNVYADSFVIRGNEVSQIAPGQTGNIADYNYKLPDDFTGCVIAWNSNKLDSKPSGNYNYLYRLFRKSKLKPFERDISTEIYQAGNRPCNGVAGPNCYSPLQSYGFRPTYGVGHQPYRVVVLSFELLHASATVCGPKKSTNLVKNKCVNFNFNGLTGTGVLTESNKKFLPFQQFGRDIADTTDAVRDPQTLEILDITPCSFGGVSVITPGTNTSNQVAVLYQGVNCTEVPVAIHADQLTPTWRVYSTGSNVFQTRAGCLIGAEYVNNSYECDIPIGAGICASYQTQTKSHQQAQSVASQSIIAYTMSLGAENSVAYSNNSIAIPTNFTISVTTEILPVSMTKTSVDCTMYICGDSTECSNLLLQYGSFCTQLKRALTGIAVEQDKNTQEVFAQVKQIYKTPPIKYFGGFNFSQILPDPSKPSKRSFIEDLLFNKVTLADAGFIKQYGDCLGDIAARDLICAQKFNGLTVLPPLLTDEMIAQYTSALLAGTITSGWTFGAGAALQIPFAMQMAYRFNGIGVTQNVLYENQKLIANQFNSAIGKIQDSLSSTASALGKLQDVVNHNAQALNTLVKQLSSKFGAISSVLNDILSRLDPPEAEVQIDRLITGRLQSLQTYVTQQLIRAAEIRASANLAATKMSECVLGQSKRVDFCGKGYHLMSFPQSAPHGVVFLHVTYVPAQEKNFTTAPAICHDGKAHFPREGVFVSNGTHWFVTQRNFYEPQIITTDNTFVSGNCDVVIGIVNNTVYDPLQPELDSFKEELDKYFKNHTSPDVDLGDISGINASVVNIQKEIDRLNEVAKNLNESLIDLQELGKYEQYIKWPWYIWLGFIAGLIAIVMVTIMLCCMTSCCSCLKGCCSCGSCCKFDEDDSEPVLKGVKLHYT

SEQ ID NO: 252 - protein, 1269 aa, synthetic construct
MFVFLVLLPLVSSQCVNLITRTQSYTNSFTRGVYYPDKVFRSSVLHSTQDLFLPFFSNVTWFHAIHVSGTNGTKRFDNPALPFNDGVYFASTEKSNIIRGWIFGTTLDSKTQSLLIVNNATNVVIKVCEFQFCNDPFLDVYQKNNKSWMESEFRVYSSANNCTFEYVSQPFLMDLVGKEGNFKNLREFVFKNIDGYFKIYSKHTPINLERDLPQGFSALEPLVDLPIGINITRFQTLLALHRSYLTPVDSSSGWTAGAAAYYVGYLQPRTFLLKYNENGTITDAVDCALDPLSETKCTLKSFTVEKGIYQTSNFRVQPTESIVRFPNITNLCPFHEVFNATTFASVYAWNRKRISNCVADYSVIYNFAPFFAFKCYGVSPTKLNDLCFTNVYADSFVIRGNEVSQIAPGQTGNIADYNYKLPDDFTGCVIAWNSNKLDSTPSGNYNYLYRLFRKSKLKPFERDISTEIYQAGNRPCNGVAGPNCYSPLQSYGFRPTYGVGHQPYRVVVLSFELLHAPATVCGPKKSTNLVKNKCVNFNFNGLTGTGVLTESNKKFLPFQQFGRDIADTTDAVRDPQTLEILDITPCSFGGVSVITPGTNTSNQVAVLYQGVNCTEVPVAIHADQLTPTWRVYSTGSNVFQTRAGCLIGAEYVNNSYECDIPIGAGICASYQTQTKSHQQAQSVASQSIIAYTMSLGAENSVAYSNNSIAIPTNFTISVTTEILPVSMTKTSVDCTMYICGDSTECSNLLLQYGSFCTQLKRALTGIAVEQDKNTQEVFAQVKQIYKTPPIKYFGGFNFSQILPDPSKPSKRSFIEDLLFNKVTLADAGFIKQYGDCLGDIAARDLICAQKFNGLTVLPPLLTDEMIAQYTSALLAGTITSGWTFGAGAALQIPFAMQMAYRFNGIGVTQNVLYENQKLIANQFNSAIGKIQDSLSSTASALGKLQDVVNHNAQALNTLVKQLSSKFGAISSVLNDILSRLDPPEAEVQIDRLITGRLQSLQTYVTQQLIRAAEIRASANLAATKMSECVLGQSKRVDFCGKGYHLMSFPQSAPHGVVFLHVTYVPAQEKNFTTAPAICHDGKAHFPREGVFVSNGTHWFVTQRNFYEPQIITTDNTFVSGNCDVVIGIVNNTVYDPLQPELDSFKEELDKYFKNHTSPDVDLGDISGINASVVNIQKEIDRLNEVAKNLNESLIDLQELGKYEQYIKWPWYIWLGFIAGLIAIVMVTIMLCCMTSCCSCLKGCCSCGSCCKFDEDDSEPVLKGVKLHYT

SEQ ID NO: 253 - protein, 1269 aa, synthetic construct
MFVFLVLLPLVSSQCVNLITRTQSYTNSFTRGVYYPDKVFRSSVLHSTQDLFLPFFSNVTWFHAIHVSGTNGTKRFDNPALPFNDGVYFASTEKSNIIRGWIFGTTLDSKTQSLLIVNNATNVVIKVCEFQFCNDPFLDVYQKNNKSWMESEFRVYSSANNCTFEYVSQPFLMDLVGKEGNFKNLREFVFKNIDGYFKIYSKHTPINLERDLPQGFSALEPLVDLPIGINITRFQTLLALHRSYLTPVDSSSGWTAGAAAYYVGYLQPRTFLLKYNENGTITDAVDCALDPLSETKCTLKSFTVEKGIYQTSNFRVQPTESIVRFPNITNLCPFHEVFNATTFASVYAWNRKRISNCVADYSVIYNFAPFFAFKCYGVSPTKLNDLCFTNVYADSFVIRGNEVSQIAPGQTGNIADYNYKLPDDFTGCVIAWNSNKLDSKPSGNYNYLYRLFRKSKLKPFERDISTEIYQAGNRPCNGVAGSNCYSPLQSYGFRPTYGVGHQPYRVVVLSFELLHAPATVCGPKKSTNLVKNKCVNFNFNGLTGTGVLTESNKKFLPFQQFGRDIADTTDAVRDPQTLEILDITPCSFGGVSVITPGTNTSNQVAVLYQGVNCTEVPVAIHADQLTPTWRVYSTGSNVFQTRAGCLIGAEYVNNSYECDIPIGAGICASYQTQTKSHQQAQSVASQSIIAYTMSLGAENSVAYSNNSIAIPTNFTISVTTEILPVSMTKTSVDCTMYICGDSTECSNLLLQYGSFCTQLKRALTGIAVEQDKNTQEVFAQVKQIYKTPPIKYFGGFNFSQILPDPSKPSKRSFIEDLLFNKVTLADAGFIKQYGDCLGDIAARDLICAQKFNGLTVLPPLLTDEMIAQYTSALLAGTITSGWTFGAGAALQIPFAMQMAYRFNGIGVTQNVLYENQKLIANQFNSAIGKIQDSLSSTASALGKLQDVVNHNAQALNTLVKQLSSKFGAISSVLNDILSRLDPPEAEVQIDRLITGRLQSLQTYVTQQLIRAAEIRASANLAATKMSECVLGQSKRVDFCGKGYHLMSFPQSAPHGVVFLHVTYVPAQEKNFTTAPAICHDGKAHFPREGVFVSNGTHWFVTQRNFYEPQIITTDNTFVSGNCDVVIGIVNNTVYDPLQPELDSFKEELDKYFKNHTSPDVDLGDISGINASVVNIQKEIDRLNEVAKNLNESLIDLQELGKYEQYIKWPWYIWLGFIAGLIAIVMVTIMLCCMTSCCSCLKGCCSCGSCCKFDEDDSEPVLKGVKLHYT

SEQ ID NO: 254 - protein, 1269 aa, synthetic construct
MFVFLVLLPLVSSQCVNLITRTQSYTNSFTRGVYYPDKVFRSSVLHSTQDLFLPFFSNVTWFHAIHVSGTNGTKRFDNPALPFNDGVYFASTEKSNIIRGWIFGTTLDSKTQSLLIVNNATNVVIKVCEFQFCNDPFLDVYQKNNKSWMESEFRVYSSANNCTFEYVSQPFLMDLVGKEGNFKNLREFVFKNIDGYFKIYSKHTPINLERDLPQGFSALEPLVDLPIGINITRFQTLLALHRSYLTPVDSSSGWTAGAAAYYVGYLQPRTFLLKYNENGTITDAVDCALDPLSETKCTLKSFTVEKGIYQTSNFRVQPTESIVRFPNITNLCPFHEVFNATTFASVYAWNRKRISNCVADYSVIYNFAPFFAFKCYGVSPTKLNDLCFTNVYADSFVIRGNEVSQIAPGQTGNIADYNYKLPDDFTGCVIAWNSNKLDSKPSGNYNYLYRLFRKSKLKPFERDISTEIYQAGNKPCNGVAGPNCYSPLQSYGFRPTYGVGHQPYRVVVLSFELLHAPATVCGPKKSTNLVKNKCVNFNFNGLTGTGVLTESNKKFLPFQQFGRDIADTTDAVRDPQTLEILDITPCSFGGVSVITPGTNTSNQVAVLYQGVNCTEVPVAIHADQLTPTWRVYSTGSNVFQTRAGCLIGAEYVNNSYECDIPIGAGICASYQTQTKSHQQAQSVASQSIIAYTMSLGAENSVAYSNNSIAIPTNFTISVTTEILPVSMTKTSVDCTMYICGDSTECSNLLLQYGSFCTQLKRALTGIAVEQDKNTQEVFAQVKQIYKTPPIKYFGGFNFSQILPDPSKPSKRSFIEDLLFNKVTLADAGFIKQYGDCLGDIAARDLICAQKFNGLTVLPPLLTDEMIAQYTSALLAGTITSGWTFGAGAALQIPFAMQMAYRFNGIGVTQNVLYENQKLIANQFNSAIGKIQDSLSSTASALGKLQDVVNHNAQALNTLVKQLSSKFGAISSVLNDILSRLDPPEAEVQIDRLITGRLQSLQTYVTQQLIRAAEIRASANLAATKMSECVLGQSKRVDFCGKGYHLMSFPQSAPHGVVFLHVTYVPAQEKNFTTAPAICHDGKAHFPREGVFVSNGTHWFVTQRNFYEPQIITTDNTFVSGNCDVVIGIVNNTVYDPLQPELDSFKEELDKYFKNHTSPDVDLGDISGINASVVNIQKEIDRLNEVAKNLNESLIDLQELGKYEQYIKWPWYIWLGFIAGLIAIVMVTIMLCCMTSCCSCLKGCCSCGSCCKFDEDDSEPVLKGVKLHYT

SEQ ID NO: 255 - protein, 1256 aa, synthetic construct
QCVNLITRTQSYTNSFTRGVYYPDKVFRSSVLHSTQDLFLPFFSNVTWFHAIHVSGTNGTKRFDNPALPFNDGVYFASTEKSNIIRGWIFGTTLDSKTQSLLIVNNATNVVIKVCEFQFCNDPFLDVYQKNNKSWMESEFRVYSSANNCTFEYVSQPFLMDLVGKEGNFKNLREFVFKNIDGYFKIYSKHTPINLERDLPQGFSALEPLVDLPIGINITRFQTLLALHRSYLTPVDSSSGWTAGAAAYYVGYLQPRTFLLKYNENGTITDAVDCALDPLSETKCTLKSFTVEKGIYQTSNFRVQPTESIVRFPNITNLCPFHEVFNATTFASVYAWNRKRISNCVADYSVIYNFAPFFAFKCYGVSPTKLNDLCFTNVYADSFVIRGNEVSQIAPGQTGNIADYNYKLPDDFTGCVIAWNSNKLDSKPSGNYNYLYRLFRKSKLKPFERDISTEIYQAGNRPCNGVAGPNCYSPLQSYGFRPTYGVGHQPYRVVVLSFELLHAPATVCGPKKSTNLVKNKCVNFNFNGLTGTGVLTESNKKFLPFQQFGRDIADTTDAVRDPQTLEILDITPCSFGGVSVITPGTNTSNQVAVLYQGVNCTEVPVAIHADQLTPTWRVYSTGSNVFQTRAGCLIGAEYVNNSYECDIPIGAGICASYQTQTKSHRRARSVASQSIIAYTMSLGAENSVAYSNNSIAIPTNFTISVTTEILPVSMTKTSVDCTMYICGDSTECSNLLLQYGSFCTQLKRALTGIAVEQDKNTQEVFAQVKQIYKTPPIKYFGGFNFSQILPDPSKPSKRSFIEDLLFNKVTLADAGFIKQYGDCLGDIAARDLICAQKFNGLTVLPPLLTDEMIAQYTSALLAGTITSGWTFGAGAALQIPFAMQMAYRFNGIGVTQNVLYENQKLIANQFNSAIGKIQDSLSSTASALGKLQDVVNHNAQALNTLVKQLSSKFGAISSVLNDILSRLDKVEAEVQIDRLITGRLQSLQTYVTQQLIRAAEIRASANLAATKMSECVLGQSKRVDFCGKGYHLMSFPQSAPHGVVFLHVTYVPAQEKNFTTAPAICHDGKAHFPREGVFVSNGTHWFVTQRNFYEPQIITTDNTFVSGNCDVVIGIVNNTVYDPLQPELDSFKEELDKYFKNHTSPDVDLGDISGINASVVNIQKEIDRLNEVAKNLNESLIDLQELGKYEQYIKWPWYIWLGFIAGLIAIVMVTIMLCCMTSCCSCLKGCCSCGSCCKFDEDDSEPVLKGVKLHYT

SEQ ID NO: 256 - protein, 1256 aa, synthetic construct
QCVNLITRTQSYTNSFTRGVYYPDKVFRSSVLHSTQDLFLPFFSNVTWFHAIHVSGTNGTKRFDNPALPFNDGVYFASTEKSNIIRGWIFGTTLDSKTQSLLIVNNATNVVIKVCEFQFCNDPFLDVYQKNNKSWMESEFRVYSSANNCTFEYVSQPFLMDLVGKEGNFKNLREFVFKNIDGYFKIYSKHTPINLERDLPQGFSALEPLVDLPIGINITRFQTLLALHRSYLTPVDSSSGWTAGAAAYYVGYLQPRTFLLKYNENGTITDAVDCALDPLSETKCTLKSFTVEKGIYQTSNFRVQPTESIVRFPNITNLCPFHEVFNATTFASVYAWNRKRISNCVADYSVIYNFAPFFAFKCYGVSPTKLNDLCFTNVYADSFVIRGNEVSQIAPGQTGNIADYNYKLPDDFTGCVIAWNSNKLDSKPSGNYNYLYRLFRKSKLKPFERDISTEIYQAGNRPCNGVAGPNCYSPLQSYGFRPTYGVGHQPYRVVVLSFELLHASATVCGPKKSTNLVKNKCVNFNFNGLTGTGVLTESNKKFLPFQQFGRDIADTTDAVRDPQTLEILDITPCSFGGVSVITPGTNTSNQVAVLYQGVNCTEVPVAIHADQLTPTWRVYSTGSNVFQTRAGCLIGAEYVNNSYECDIPIGAGICASYQTQTKSHRRARSVASQSIIAYTMSLGAENSVAYSNNSIAIPTNFTISVTTEILPVSMTKTSVDCTMYICGDSTECSNLLLQYGSFCTQLKRALTGIAVEQDKNTQEVFAQVKQIYKTPPIKYFGGFNFSQILPDPSKPSKRSFIEDLLFNKVTLADAGFIKQYGDCLGDIAARDLICAQKFNGLTVLPPLLTDEMIAQYTSALLAGTITSGWTFGAGAALQIPFAMQMAYRFNGIGVTQNVLYENQKLIANQFNSAIGKIQDSLSSTASALGKLQDVVNHNAQALNTLVKQLSSKFGAISSVLNDILSRLDKVEAEVQIDRLITGRLQSLQTYVTQQLIRAAEIRASANLAATKMSECVLGQSKRVDFCGKGYHLMSFPQSAPHGVVFLHVTYVPAQEKNFTTAPAICHDGKAHFPREGVFVSNGTHWFVTQRNFYEPQIITTDNTFVSGNCDVVIGIVNNTVYDPLQPELDSFKEELDKYFKNHTSPDVDLGDISGINASVVNIQKEIDRLNEVAKNLNESLIDLQELGKYEQYIKWPWYIWLGFIAGLIAIVMVTIMLCCMTSCCSCLKGCCSCGSCCKFDEDDSEPVLKGVKLHYT

SEQ ID NO: 257 - protein, 1256 aa, synthetic construct
QCVNLITRTQSYTNSFTRGVYYPDKVFRSSVLHSTQDLFLPFFSNVTWFHAIHVSGTNGTKRFDNPALPFNDGVYFASTEKSNIIRGWIFGTTLDSKTQSLLIVNNATNVVIKVCEFQFCNDPFLDVYQKNNKSWMESEFRVYSSANNCTFEYVSQPFLMDLVGKEGNFKNLREFVFKNIDGYFKIYSKHTPINLERDLPQGFSALEPLVDLPIGINITRFQTLLALHRSYLTPVDSSSGWTAGAAAYYVGYLQPRTFLLKYNENGTITDAVDCALDPLSETKCTLKSFTVEKGIYQTSNFRVQPTESIVRFPNITNLCPFHEVFNATTFASVYAWNRKRISNCVADYSVIYNFAPFFAFKCYGVSPTKLNDLCFTNVYADSFVIRGNEVSQIAPGQTGNIADYNYKLPDDFTGCVIAWNSNKLDSTPSGNYNYLYRLFRKSKLKPFERDISTEIYQAGNRPCNGVAGPNCYSPLQSYGFRPTYGVGHQPYRVVVLSFELLHAPATVCGPKKSTNLVKNKCVNFNFNGLTGTGVLTESNKKFLPFQQFGRDIADTTDAVRDPQTLEILDITPCSFGGVSVITPGTNTSNQVAVLYQGVNCTEVPVAIHADQLTPTWRVYSTGSNVFQTRAGCLIGAEYVNNSYECDIPIGAGICASYQTQTKSHRRARSVASQSIIAYTMSLGAENSVAYSNNSIAIPTNFTISVTTEILPVSMTKTSVDCTMYICGDSTECSNLLLQYGSFCTQLKRALTGIAVEQDKNTQEVFAQVKQIYKTPPIKYFGGFNFSQILPDPSKPSKRSFIEDLLFNKVTLADAGFIKQYGDCLGDIAARDLICAQKFNGLTVLPPLLTDEMIAQYTSALLAGTITSGWTFGAGAALQIPFAMQMAYRFNGIGVTQNVLYENQKLIANQFNSAIGKIQDSLSSTASALGKLQDVVNHNAQALNTLVKQLSSKFGAISSVLNDILSRLDKVEAEVQIDRLITGRLQSLQTYVTQQLIRAAEIRASANLAATKMSECVLGQSKRVDFCGKGYHLMSFPQSAPHGVVFLHVTYVPAQEKNFTTAPAICHDGKAHFPREGVFVSNGTHWFVTQRNFYEPQIITTDNTFVSGNCDVVIGIVNNTVYDPLQPELDSFKEELDKYFKNHTSPDVDLGDISGINASVVNIQKEIDRLNEVAKNLNESLIDLQELGKYEQYIKWPWYIWLGFIAGLIAIVMVTIMLCCMTSCCSCLKGCCSCGSCCKFDEDDSEPVLKGVKLHYT

SEQ ID NO: 258 - protein, 1256 aa, synthetic construct
QCVNLITRTQSYTNSFTRGVYYPDKVFRSSVLHSTQDLFLPFFSNVTWFHAIHVSGTNGTKRFDNPALPFNDGVYFASTEKSNIIRGWIFGTTLDSKTQSLLIVNNATNVVIKVCEFQFCNDPFLDVYQKNNKSWMESEFRVYSSANNCTFEYVSQPFLMDLVGKEGNFKNLREFVFKNIDGYFKIYSKHTPINLERDLPQGFSALEPLVDLPIGINITRFQTLLALHRSYLTPVDSSSGWTAGAAAYYVGYLQPRTFLLKYNENGTITDAVDCALDPLSETKCTLKSFTVEKGIYQTSNFRVQPTESIVRFPNITNLCPFHEVFNATTFASVYAWNRKRISNCVADYSVIYNFAPFFAFKCYGVSPTKLNDLCFTNVYADSFVIRGNEVSQIAPGQTGNIADYNYKLPDDFTGCVIAWNSNKLDSKPSGNYNYLYRLFRKSKLKPFERDISTEIYQAGNRPCNGVAGSNCYSPLQSYGFRPTYGVGHQPYRVVVLSFELLHAPATVCGPKKSTNLVKNKCVNFNFNGLTGTGVLTESNKKFLPFQQFGRDIADTTDAVRDPQTLEILDITPCSFGGVSVITPGTNTSNQVAVLYQGVNCTEVPVAIHADQLTPTWRVYSTGSNVFQTRAGCLIGAEYVNNSYECDIPIGAGICASYQTQTKSHRRARSVASQSIIAYTMSLGAENSVAYSNNSIAIPTNFTISVTTEILPVSMTKTSVDCTMYICGDSTECSNLLLQYGSFCTQLKRALTGIAVEQDKNTQEVFAQVKQIYKTPPIKYFGGFNFSQILPDPSKPSKRSFIEDLLFNKVTLADAGFIKQYGDCLGDIAARDLICAQKFNGLTVLPPLLTDEMIAQYTSALLAGTITSGWTFGAGAALQIPFAMQMAYRFNGIGVTQNVLYENQKLIANQFNSAIGKIQDSLSSTASALGKLQDVVNHNAQALNTLVKQLSSKFGAISSVLNDILSRLDKVEAEVQIDRLITGRLQSLQTYVTQQLIRAAEIRASANLAATKMSECVLGQSKRVDFCGKGYHLMSFPQSAPHGVVFLHVTYVPAQEKNFTTAPAICHDGKAHFPREGVFVSNGTHWFVTQRNFYEPQIITTDNTFVSGNCDVVIGIVNNTVYDPLQPELDSFKEELDKYFKNHTSPDVDLGDISGINASVVNIQKEIDRLNEVAKNLNESLIDLQELGKYEQYIKWPWYIWLGFIAGLIAIVMVTIMLCCMTSCCSCLKGCCSCGSCCKFDEDDSEPVLKGVKLHYT

SEQ ID NO: 259 - protein, 1256 aa, synthetic construct
QCVNLITRTQSYTNSFTRGVYYPDKVFRSSVLHSTQDLFLPFFSNVTWFHAIHVSGTNGTKRFDNPALPFNDGVYFASTEKSNIIRGWIFGTTLDSKTQSLLIVNNATNVVIKVCEFQFCNDPFLDVYQKNNKSWMESEFRVYSSANNCTFEYVSQPFLMDLVGKEGNFKNLREFVFKNIDGYFKIYSKHTPINLERDLPQGFSALEPLVDLPIGINITRFQTLLALHRSYLTPVDSSSGWTAGAAAYYVGYLQPRTFLLKYNENGTITDAVDCALDPLSETKCTLKSFTVEKGIYQTSNFRVQPTESIVRFPNITNLCPFHEVFNATTFASVYAWNRKRISNCVADYSVIYNFAPFFAFKCYGVSPTKLNDLCFTNVYADSFVIRGNEVSQIAPGQTGNIADYNYKLPDDFTGCVIAWNSNKLDSKPSGNYNYLYRLFRKSKLKPFERDISTEIYQAGNKPCNGVAGPNCYSPLQSYGFRPTYGVGHQPYRVVVLSFELLHAPATVCGPKKSTNLVKNKCVNFNFNGLTGTGVLTESNKKFLPFQQFGRDIADTTDAVRDPQTLEILDITPCSFGGVSVITPGTNTSNQVAVLYQGVNCTEVPVAIHADQLTPTWRVYSTGSNVFQTRAGCLIGAEYVNNSYECDIPIGAGICASYQTQTKSHRRARSVASQSIIAYTMSLGAENSVAYSNNSIAIPTNFTISVTTEILPVSMTKTSVDCTMYICGDSTECSNLLLQYGSFCTQLKRALTGIAVEQDKNTQEVFAQVKQIYKTPPIKYFGGFNFSQILPDPSKPSKRSFIEDLLFNKVTLADAGFIKQYGDCLGDIAARDLICAQKFNGLTVLPPLLTDEMIAQYTSALLAGTITSGWTFGAGAALQIPFAMQMAYRFNGIGVTQNVLYENQKLIANQFNSAIGKIQDSLSSTASALGKLQDVVNHNAQALNTLVKQLSSKFGAISSVLNDILSRLDKVEAEVQIDRLITGRLQSLQTYVTQQLIRAAEIRASANLAATKMSECVLGQSKRVDFCGKGYHLMSFPQSAPHGVVFLHVTYVPAQEKNFTTAPAICHDGKAHFPREGVFVSNGTHWFVTQRNFYEPQIITTDNTFVSGNCDVVIGIVNNTVYDPLQPELDSFKEELDKYFKNHTSPDVDLGDISGINASVVNIQKEIDRLNEVAKNLNESLIDLQELGKYEQYIKWPWYIWLGFIAGLIAIVMVTIMLCCMTSCCSCLKGCCSCGSCCKFDEDDSEPVLKGVKLHYT

SEQ ID NO: 260 - protein, 1256 aa, synthetic construct
QCVNLITRTQSYTNSFTRGVYYPDKVFRSSVLHSTQDLFLPFFSNVTWFHAIHVSGTNGTKRFDNPALPFNDGVYFASTEKSNIIRGWIFGTTLDSKTQSLLIVNNATNVVIKVCEFQFCNDPFLDVYQKNNKSWMESEFRVYSSANNCTFEYVSQPFLMDLVGKEGNFKNLREFVFKNIDGYFKIYSKHTPINLERDLPQGFSALEPLVDLPIGINITRFQTLLALHRSYLTPVDSSSGWTAGAAAYYVGYLQPRTFLLKYNENGTITDAVDCALDPLSETKCTLKSFTVEKGIYQTSNFRVQPTESIVRFPNITNLCPFHEVFNATTFASVYAWNRKRISNCVADYSVIYNFAPFFAFKCYGVSPTKLNDLCFTNVYADSFVIRGNEVSQIAPGQTGNIADYNYKLPDDFTGCVIAWNSNKLDSKPSGNYNYLYRLFRKSKLKPFERDISTEIYQAGNRPCNGVAGPNCYSPLQSYGFRPTYGVGHQPYRVVVLSFELLHAPATVCGPKKSTNLVKNKCVNFNFNGLTGTGVLTESNKKFLPFQQFGRDIADTTDAVRDPQTLEILDITPCSFGGVSVITPGTNTSNQVAVLYQGVNCTEVPVAIHADQLTPTWRVYSTGSNVFQTRAGCLIGAEYVNNSYECDIPIGAGICASYQTQTKSHQQAQSVASQSIIAYTMSLGAENSVAYSNNSIAIPTNFTISVTTEILPVSMTKTSVDCTMYICGDSTECSNLLLQYGSFCTQLKRALTGIAVEQDKNTQEVFAQVKQIYKTPPIKYFGGFNFSQILPDPSKPSKRSFIEDLLFNKVTLADAGFIKQYGDCLGDIAARDLICAQKFNGLTVLPPLLTDEMIAQYTSALLAGTITSGWTFGAGAALQIPFAMQMAYRFNGIGVTQNVLYENQKLIANQFNSAIGKIQDSLSSTASALGKLQDVVNHNAQALNTLVKQLSSKFGAISSVLNDILSRLDPPEAEVQIDRLITGRLQSLQTYVTQQLIRAAEIRASANLAATKMSECVLGQSKRVDFCGKGYHLMSFPQSAPHGVVFLHVTYVPAQEKNFTTAPAICHDGKAHFPREGVFVSNGTHWFVTQRNFYEPQIITTDNTFVSGNCDVVIGIVNNTVYDPLQPELDSFKEELDKYFKNHTSPDVDLGDISGINASVVNIQKEIDRLNEVAKNLNESLIDLQELGKYEQYIKWPWYIWLGFIAGLIAIVMVTIMLCCMTSCCSCLKGCCSCGSCCKFDEDDSEPVLKGVKLHYT

SEQ ID NO: 261 - protein, 1256 aa, synthetic construct
QCVNLITRTQSYTNSFTRGVYYPDKVFRSSVLHSTQDLFLPFFSNVTWFHAIHVSGTNGTKRFDNPALPFNDGVYFASTEKSNIIRGWIFGTTLDSKTQSLLIVNNATNVVIKVCEFQFCNDPFLDVYQKNNKSWMESEFRVYSSANNCTFEYVSQPFLMDLVGKEGNFKNLREFVFKNIDGYFKIYSKHTPINLERDLPQGFSALEPLVDLPIGINITRFQTLLALHRSYLTPVDSSSGWTAGAAAYYVGYLQPRTFLLKYNENGTITDAVDCALDPLSETKCTLKSFTVEKGIYQTSNFRVQPTESIVRFPNITNLCPFHEVFNATTFASVYAWNRKRISNCVADYSVIYNFAPFFAFKCYGVSPTKLNDLCFTNVYADSFVIRGNEVSQIAPGQTGNIADYNYKLPDDFTGCVIAWNSNKLDSKPSGNYNYLYRLFRKSKLKPFERDISTEIYQAGNRPCNGVAGPNCYSPLQSYGFRPTYGVGHQPYRVVVLSFELLHASATVCGPKKSTNLVKNKCVNFNFNGLTGTGVLTESNKKFLPFQQFGRDIADTTDAVRDPQTLEILDITPCSFGGVSVITPGTNTSNQVAVLYQGVNCTEVPVAIHADQLTPTWRVYSTGSNVFQTRAGCLIGAEYVNNSYECDIPIGAGICASYQTQTKSHQQAQSVASQSIIAYTMSLGAENSVAYSNNSIAIPTNFTISVTTEILPVSMTKTSVDCTMYICGDSTECSNLLLQYGSFCTQLKRALTGIAVEQDKNTQEVFAQVKQIYKTPPIKYFGGFNFSQILPDPSKPSKRSFIEDLLFNKVTLADAGFIKQYGDCLGDIAARDLICAQKFNGLTVLPPLLTDEMIAQYTSALLAGTITSGWTFGAGAALQIPFAMQMAYRFNGIGVTQNVLYENQKLIANQFNSAIGKIQDSLSSTASALGKLQDVVNHNAQALNTLVKQLSSKFGAISSVLNDILSRLDPPEAEVQIDRLITGRLQSLQTYVTQQLIRAAEIRASANLAATKMSECVLGQSKRVDFCGKGYHLMSFPQSAPHGVVFLHVTYVPAQEKNFTTAPAICHDGKAHFPREGVFVSNGTHWFVTQRNFYEPQIITTDNTFVSGNCDVVIGIVNNTVYDPLQPELDSFKEELDKYFKNHTSPDVDLGDISGINASVVNIQKEIDRLNEVAKNLNESLIDLQELGKYEQYIKWPWYIWLGFIAGLIAIVMVTIMLCCMTSCCSCLKGCCSCGSCCKFDEDDSEPVLKGVKLHYT

SEQ ID NO: 262 - protein, 1256 aa, synthetic construct
QCVNLITRTQSYTNSFTRGVYYPDKVFRSSVLHSTQDLFLPFFSNVTWFHAIHVSGTNGTKRFDNPALPFNDGVYFASTEKSNIIRGWIFGTTLDSKTQSLLIVNNATNVVIKVCEFQFCNDPFLDVYQKNNKSWMESEFRVYSSANNCTFEYVSQPFLMDLVGKEGNFKNLREFVFKNIDGYFKIYSKHTPINLERDLPQGFSALEPLVDLPIGINITRFQTLLALHRSYLTPVDSSSGWTAGAAAYYVGYLQPRTFLLKYNENGTITDAVDCALDPLSETKCTLKSFTVEKGIYQTSNFRVQPTESIVRFPNITNLCPFHEVFNATTFASVYAWNRKRISNCVADYSVIYNFAPFFAFKCYGVSPTKLNDLCFTNVYADSFVIRGNEVSQIAPGQTGNIADYNYKLPDDFTGCVIAWNSNKLDSTPSGNYNYLYRLFRKSKLKPFERDISTEIYQAGNRPCNGVAGPNCYSPLQSYGFRPTYGVGHQPYRVVVLSFELLHAPATVCGPKKSTNLVKNKCVNFNFNGLTGTGVLTESNKKFLPFQQFGRDIADTTDAVRDPQTLEILDITPCSFGGVSVITPGTNTSNQVAVLYQGVNCTEVPVAIHADQLTPTWRVYSTGSNVFQTRAGCLIGAEYVNNSYECDIPIGAGICASYQTQTKSHQQAQSVASQSIIAYTMSLGAENSVAYSNNSIAIPTNFTISVTTEILPVSMTKTSVDCTMYICGDSTECSNLLLQYGSFCTQLKRALTGIAVEQDKNTQEVFAQVKQIYKTPPIKYFGGFNFSQILPDPSKPSKRSFIEDLLFNKVTLADAGFIKQYGDCLGDIAARDLICAQKFNGLTVLPPLLTDEMIAQYTSALLAGTITSGWTFGAGAALQIPFAMQMAYRFNGIGVTQNVLYENQKLIANQFNSAIGKIQDSLSSTASALGKLQDVVNHNAQALNTLVKQLSSKFGAISSVLNDILSRLDPPEAEVQIDRLITGRLQSLQTYVTQQLIRAAEIRASANLAATKMSECVLGQSKRVDFCGKGYHLMSFPQSAPHGVVFLHVTYVPAQEKNFTTAPAICHDGKAHFPREGVFVSNGTHWFVTQRNFYEPQIITTDNTFVSGNCDVVIGIVNNTVYDPLQPELDSFKEELDKYFKNHTSPDVDLGDISGINASVVNIQKEIDRLNEVAKNLNESLIDLQELGKYEQYIKWPWYIWLGFIAGLIAIVMVTIMLCCMTSCCSCLKGCCSCGSCCKFDEDDSEPVLKGVKLHYT

SEQ ID NO: 263 - protein, 1256 aa, synthetic construct
QCVNLITRTQSYTNSFTRGVYYPDKVFRSSVLHSTQDLFLPFFSNVTWFHAIHVSGTNGTKRFDNPALPFNDGVYFASTEKSNIIRGWIFGTTLDSKTQSLLIVNNATNVVIKVCEFQFCNDPFLDVYQKNNKSWMESEFRVYSSANNCTFEYVSQPFLMDLVGKEGNFKNLREFVFKNIDGYFKIYSKHTPINLERDLPQGFSALEPLVDLPIGINITRFQTLLALHRSYLTPVDSSSGWTAGAAAYYVGYLQPRTFLLKYNENGTITDAVDCALDPLSETKCTLKSFTVEKGIYQTSNFRVQPTESIVRFPNITNLCPFHEVFNATTFASVYAWNRKRISNCVADYSVIYNFAPFFAFKCYGVSPTKLNDLCFTNVYADSFVIRGNEVSQIAPGQTGNIADYNYKLPDDFTGCVIAWNSNKLDSKPSGNYNYLYRLFRKSKLKPFERDISTEIYQAGNRPCNGVAGSNCYSPLQSYGFRPTYGVGHQPYRVVVLSFELLHAPATVCGPKKSTNLVKNKCVNFNFNGLTGTGVLTESNKKFLPFQQFGRDIADTTDAVRDPQTLEILDITPCSFGGVSVITPGTNTSNQVAVLYQGVNCTEVPVAIHADQLTPTWRVYSTGSNVFQTRAGCLIGAEYVNNSYECDIPIGAGICASYQTQTKSHQQAQSVASQSIIAYTMSLGAENSVAYSNNSIAIPTNFTISVTTEILPVSMTKTSVDCTMYICGDSTECSNLLLQYGSFCTQLKRALTGIAVEQDKNTQEVFAQVKQIYKTPPIKYFGGFNFSQILPDPSKPSKRSFIEDLLFNKVTLADAGFIKQYGDCLGDIAARDLICAQKFNGLTVLPPLLTDEMIAQYTSALLAGTITSGWTFGAGAALQIPFAMQMAYRFNGIGVTQNVLYENQKLIANQFNSAIGKIQDSLSSTASALGKLQDVVNHNAQALNTLVKQLSSKFGAISSVLNDILSRLDPPEAEVQIDRLITGRLQSLQTYVTQQLIRAAEIRASANLAATKMSECVLGQSKRVDFCGKGYHLMSFPQSAPHGVVFLHVTYVPAQEKNFTTAPAICHDGKAHFPREGVFVSNGTHWFVTQRNFYEPQIITTDNTFVSGNCDVVIGIVNNTVYDPLQPELDSFKEELDKYFKNHTSPDVDLGDISGINASVVNIQKEIDRLNEVAKNLNESLIDLQELGKYEQYIKWPWYIWLGFIAGLIAIVMVTIMLCCMTSCCSCLKGCCSCGSCCKFDEDDSEPVLKGVKLHYT

SEQ ID NO: 264 - protein, 1256 aa, synthetic construct
QCVNLITRTQSYTNSFTRGVYYPDKVFRSSVLHSTQDLFLPFFSNVTWFHAIHVSGTNGTKRFDNPALPFNDGVYFASTEKSNIIRGWIFGTTLDSKTQSLLIVNNATNVVIKVCEFQFCNDPFLDVYQKNNKSWMESEFRVYSSANNCTFEYVSQPFLMDLVGKEGNFKNLREFVFKNIDGYFKIYSKHTPINLERDLPQGFSALEPLVDLPIGINITRFQTLLALHRSYLTPVDSSSGWTAGAAAYYVGYLQPRTFLLKYNENGTITDAVDCALDPLSETKCTLKSFTVEKGIYQTSNFRVQPTESIVRFPNITNLCPFHEVFNATTFASVYAWNRKRISNCVADYSVIYNFAPFFAFKCYGVSPTKLNDLCFTNVYADSFVIRGNEVSQIAPGQTGNIADYNYKLPDDFTGCVIAWNSNKLDSKPSGNYNYLYRLFRKSKLKPFERDISTEIYQAGNKPCNGVAGPNCYSPLQSYGFRPTYGVGHQPYRVVVLSFELLHAPATVCGPKKSTNLVKNKCVNFNFNGLTGTGVLTESNKKFLPFQQFGRDIADTTDAVRDPQTLEILDITPCSFGGVSVITPGTNTSNQVAVLYQGVNCTEVPVAIHADQLTPTWRVYSTGSNVFQTRAGCLIGAEYVNNSYECDIPIGAGICASYQTQTKSHQQAQSVASQSIIAYTMSLGAENSVAYSNNSIAIPTNFTISVTTEILPVSMTKTSVDCTMYICGDSTECSNLLLQYGSFCTQLKRALTGIAVEQDKNTQEVFAQVKQIYKTPPIKYFGGFNFSQILPDPSKPSKRSFIEDLLFNKVTLADAGFIKQYGDCLGDIAARDLICAQKFNGLTVLPPLLTDEMIAQYTSALLAGTITSGWTFGAGAALQIPFAMQMAYRFNGIGVTQNVLYENQKLIANQFNSAIGKIQDSLSSTASALGKLQDVVNHNAQALNTLVKQLSSKFGAISSVLNDILSRLDPPEAEVQIDRLITGRLQSLQTYVTQQLIRAAEIRASANLAATKMSECVLGQSKRVDFCGKGYHLMSFPQSAPHGVVFLHVTYVPAQEKNFTTAPAICHDGKAHFPREGVFVSNGTHWFVTQRNFYEPQIITTDNTFVSGNCDVVIGIVNNTVYDPLQPELDSFKEELDKYFKNHTSPDVDLGDISGINASVVNIQKEIDRLNEVAKNLNESLIDLQELGKYEQYIKWPWYIWLGFIAGLIAIVMVTIMLCCMTSCCSCLKGCCSCGSCCKFDEDDSEPVLKGVKLHYT

SEQ ID NO: 265 - protein, 1269 aa, synthetic construct
MFVFLVLLPLVSSQCVNLITRTQSYTNSFTRGVYYPDKVFRSSVLHSTQDLFLPFFSNVTWFHAIHVSGTNGTKRFDNPALPFNDGVYFASTEKSNIIRGWIFGTTLDSKTQSLLIVNNATNVVIKVCEFQFCNDPFLDVYQKNNKSWMESEFRVYSSANNCTFEYVSQPFLMDLEGKEGNFKNLREFVFKNIDGYFKIYSKHTPINLERDLPQGFSALEPLVDLPIGINITRFQTLLALHRSYLTPVDSSSGWTAGAAAYYVGYLQPRTFLLKYNENGTITDAVDCALDPLSETKCTLKSFTVEKGIYQTSNFRVQPTESIVRFPNITNLCPFHEVFNATTFASVYAWNRKRISNCVADYSVIYNFAPFFAFKCYGVSPTKLNDLCFTNVYADSFVIRGNEVSQIAPGQTGNIADYNYKLPDDFTGCVIAWNSNKLDSKPSGNYNYLYRLFRKSKLKPFERDISTEIYQAGNKPCNGVAGPNCYSPLQSYGFRPTYGVGHQPYRVVVLSFELLHAPATVCGPKKSTNLVKNKCVNFNFNGLTGTGVLTESNKKFLPFQQFGRDIADTTDAVRDPQTLEILDITPCSFGGVSVITPGTNTSNQVAVLYQGVNCTEVPVAIHADQLTPTWRVYSTGSNVFQTRAGCLIGAEYVNNSYECDIPIGAGICASYQTQTKSHRRARSVASQSIIAYTMSLGAENSVAYSNNSIAIPTNFTISVTTEILPVSMTKTSVDCTMYICGDSTECSNLLLQYGSFCTQLKRALTGIAVEQDKNTQEVFAQVKQIYKTPPIKYFGGFNFSQILPDPSKPSKRSFIEDLLFNKVTLADAGFIKQYGDCLGDIAARDLICAQKFNGLTVLPPLLTDEMIAQYTSALLAGTITSGWTFGAGAALQIPFAMQMAYRFNGIGVTQNVLYENQKLIANQFNSAIGKIQDSLSSTASALGKLQDVVNHNAQALNTLVKQLSSKFGAISSVLNDILSRLDKVEAEVQIDRLITGRLQSLQTYVTQQLIRAAEIRASANLAATKMSECVLGQSKRVDFCGKGYHLMSFPQSAPHGVVFLHVTYVPAQEKNFTTAPAICHDGKAHFPREGVFVSNGTHWFVTQRNFYEPQIITTDNTFVSGNCDVVIGIVNNTVYDPLQPELDSFKEELDKYFKNHTSPDVDLGDISGINASVVNIQKEIDRLNEVAKNLNESLIDLQELGKYEQYIKWPWYIWLGFIAGLIAIVMVTIMLCCMTSCCSCLKGCCSCGSCCKFDEDDSEPVLKGVKLHYT

SEQ ID NO: 266 - protein, 1269 aa, synthetic construct
MFVFLVLLPLVSSQCVNLITRTQSYTNSFTRGVYYPDKVFRSSVLHSTQDLFLPFFSNVTWFHAIHVSGTNGTKRFDNPALPFNDGVYFASTEKSNIIRGWIFGTTLDSKTQSLLIVNNATNVVIKVCEFQFCNDPFLDVYQKNNKSWMESEFRVYSSANNCTFEYVSQPFLMDLEGKEGNFKNLREFVFKNIDGYFKIYSKHTPINLERDLPQGFSALEPLVDLPIGINITRFQTLLALHRSYLTPVDSSSGWTAGAAAYYVGYLQPRTFLLKYNENGTITDAVDCALDPLSETKCTLKSFTVEKGIYQTSNFRVQPTESIVRFPNITNLCPFHEVFNATTFASVYAWNRKRISNCVADYSVIYNFAPFFAFKCYGVSPTKLNDLCFTNVYADSFVIRGNEVSQIAPGQTGNIADYNYKLPDDFTGCVIAWNSNKLDSKPSGNYNYLYRLFRKSKLKPFERDISTEIYQAGNKPCNGVAGPNCYSPLQSYGFRPTYGVGHQPYRVVVLSFELLHAPATVCGPKKSTNLVKNKCVNFNFNGLTGTGVLTESNKKFLPFQQFGRDIADTTDAVRDPQTLEILDITPCSFGGVSVITPGTNTSNQVAVLYQGVNCTEVPVAIHADQLTPTWRVYSTGSNVFQTRAGCLIGAEYVNNSYECDIPIGAGICASYQTQTKSHQQAQSVASQSIIAYTMSLGAENSVAYSNNSIAIPTNFTISVTTEILPVSMTKTSVDCTMYICGDSTECSNLLLQYGSFCTQLKRALTGIAVEQDKNTQEVFAQVKQIYKTPPIKYFGGFNFSQILPDPSKPSKRSFIEDLLFNKVTLADAGFIKQYGDCLGDIAARDLICAQKFNGLTVLPPLLTDEMIAQYTSALLAGTITSGWTFGAGAALQIPFAMQMAYRFNGIGVTQNVLYENQKLIANQFNSAIGKIQDSLSSTASALGKLQDVVNHNAQALNTLVKQLSSKFGAISSVLNDILSRLDPPEAEVQIDRLITGRLQSLQTYVTQQLIRAAEIRASANLAATKMSECVLGQSKRVDFCGKGYHLMSFPQSAPHGVVFLHVTYVPAQEKNFTTAPAICHDGKAHFPREGVFVSNGTHWFVTQRNFYEPQIITTDNTFVSGNCDVVIGIVNNTVYDPLQPELDSFKEELDKYFKNHTSPDVDLGDISGINASVVNIQKEIDRLNEVAKNLNESLIDLQELGKYEQYIKWPWYIWLGFIAGLIAIVMVTIMLCCMTSCCSCLKGCCSCGSCCKFDEDDSEPVLKGVKLHYT

SEQ ID NO: 267 - protein, 1269 aa, synthetic construct
MFVFLVLLPLVSSQCVNLITRTQSYTNSFTRGVYYPDKVFRSSVLHSTQDLFLPFFSNVTWFHAIHVSGTNGTKRFDNPALPFNDGVYFASTEKSNIIRGWIFGTTLDSKTQSLLIVNNATNVVIKVCEFQFCNDPFLDVYQKNNKSWMESEFRVYSSANNCTFEYVSQPFLMDLEGKEGNFKNLREFVFKNIDGYFKIYSKHTPINLERDLPQGFSALEPLVDLPIGINITRFQTLLALHRSYLTPVDSSSGWTAGAAAYYVGYLQPRTFLLKYNENGTITDAVDCALDPLSETKCTLKSFTVEKGIYQTSNFRVQPTESIVRFPNITNLCPFHEVFNATTFASVYAWNRKRISNCVADYSVIYNFAPFFAFKCYGVSPTKLNDLCFTNVYADSFVIRGNEVSQIAPGQTGNIADYNYKLPDDFTGCVIAWNSNKLDSKPSGNYNYLYRLFRKSKLKPFERDISTEIYQAGNKPCNGVAGPNCYSPLQSYGFRPTYGVGHQPYRVVVLSFELLHASATVCGPKKSTNLVKNKCVNFNFNGLTGTGVLTESNKKFLPFQQFGRDIADTTDAVRDPQTLEILDITPCSFGGVSVITPGTNTSNQVAVLYQGVNCTEVPVAIHADQLTPTWRVYSTGSNVFQTRAGCLIGAEYVNNSYECDIPIGAGICASYQTQTKSHRRARSVASQSIIAYTMSLGAENSVAYSNNSIAIPTNFTISVTTEILPVSMTKTSVDCTMYICGDSTECSNLLLQYGSFCTQLKRALTGIAVEQDKNTQEVFAQVKQIYKTPPIKYFGGFNFSQILPDPSKPSKRSFIEDLLFNKVTLADAGFIKQYGDCLGDIAARDLICAQKFNGLTVLPPLLTDEMIAQYTSALLAGTITSGWTFGAGAALQIPFAMQMAYRFNGIGVTQNVLYENQKLIANQFNSAIGKIQDSLSSTASALGKLQDVVNHNAQALNTLVKQLSSKFGAISSVLNDILSRLDKVEAEVQIDRLITGRLQSLQTYVTQQLIRAAEIRASANLAATKMSECVLGQSKRVDFCGKGYHLMSFPQSAPHGVVFLHVTYVPAQEKNFTTAPAICHDGKAHFPREGVFVSNGTHWFVTQRNFYEPQIITTDNTFVSGNCDVVIGIVNNTVYDPLQPELDSFKEELDKYFKNHTSPDVDLGDISGINASVVNIQKEIDRLNEVAKNLNESLIDLQELGKYEQYIKWPWYIWLGFIAGLIAIVMVTIMLCCMTSCCSCLKGCCSCGSCCKFDEDDSEPVLKGVKLHYT

SEQ ID NO: 268 - protein, 1269 aa, synthetic construct
MFVFLVLLPLVSSQCVNLITRTQSYTNSFTRGVYYPDKVFRSSVLHSTQDLFLPFFSNVTWFHAIHVSGTNGTKRFDNPALPFNDGVYFASTEKSNIIRGWIFGTTLDSKTQSLLIVNNATNVVIKVCEFQFCNDPFLDVYQKNNKSWMESEFRVYSSANNCTFEYVSQPFLMDLEGKEGNFKNLREFVFKNIDGYFKIYSKHTPINLERDLPQGFSALEPLVDLPIGINITRFQTLLALHRSYLTPVDSSSGWTAGAAAYYVGYLQPRTFLLKYNENGTITDAVDCALDPLSETKCTLKSFTVEKGIYQTSNFRVQPTESIVRFPNITNLCPFHEVFNATTFASVYAWNRKRISNCVADYSVIYNFAPFFAFKCYGVSPTKLNDLCFTNVYADSFVIRGNEVSQIAPGQTGNIADYNYKLPDDFTGCVIAWNSNKLDSKPSGNYNYLYRLFRKSKLKPFERDISTEIYQAGNKPCNGVAGPNCYSPLQSYGFRPTYGVGHQPYRVVVLSFELLHASATVCGPKKSTNLVKNKCVNFNFNGLTGTGVLTESNKKFLPFQQFGRDIADTTDAVRDPQTLEILDITPCSFGGVSVITPGTNTSNQVAVLYQGVNCTEVPVAIHADQLTPTWRVYSTGSNVFQTRAGCLIGAEYVNNSYECDIPIGAGICASYQTQTKSHQQAQSVASQSIIAYTMSLGAENSVAYSNNSIAIPTNFTISVTTEILPVSMTKTSVDCTMYICGDSTECSNLLLQYGSFCTQLKRALTGIAVEQDKNTQEVFAQVKQIYKTPPIKYFGGFNFSQILPDPSKPSKRSFIEDLLFNKVTLADAGFIKQYGDCLGDIAARDLICAQKFNGLTVLPPLLTDEMIAQYTSALLAGTITSGWTFGAGAALQIPFAMQMAYRFNGIGVTQNVLYENQKLIANQFNSAIGKIQDSLSSTASALGKLQDVVNHNAQALNTLVKQLSSKFGAISSVLNDILSRLDPPEAEVQIDRLITGRLQSLQTYVTQQLIRAAEIRASANLAATKMSECVLGQSKRVDFCGKGYHLMSFPQSAPHGVVFLHVTYVPAQEKNFTTAPAICHDGKAHFPREGVFVSNGTHWFVTQRNFYEPQIITTDNTFVSGNCDVVIGIVNNTVYDPLQPELDSFKEELDKYFKNHTSPDVDLGDISGINASVVNIQKEIDRLNEVAKNLNESLIDLQELGKYEQYIKWPWYIWLGFIAGLIAIVMVTIMLCCMTSCCSCLKGCCSCGSCCKFDEDDSEPVLKGVKLHYT

SEQ ID NO: 269 - protein, 1269 aa, synthetic construct
MFVFLVLLPLVSSQCVNLITRTQSYTNSFTRGVYYPDKVFRSSVLHSTQDLFLPFFSNVTWFHAIHVSGTNGTKRFDNPALPFNDGVYFASTEKSNIIRGWIFGTTLDSKTQSLLIVNNATNVVIKVCEFQFCNDPFLDVYQKNNKSWMESEFRVYSSANNCTFEYVSQPFLMDLEGKEGNFKNLREFVFKNIDGYFKIYSKHTPINLERDLPQGFSALEPLVDLPIGINITRFQTLLALHRSYLTPVDSSSGWTAGAAAYYVGYLQPRTFLLKYNENGTITDAVDCALDPLSETKCTLKSFTVEKGIYQTSNFRVQPTESIVRFPNITNLCPFHEVFNATTFASVYAWNRKRISNCVADYSVIYNFAPFFAFKCYGVSPTKLNDLCFTNVYADSFVIRGNEVSQIAPGQTGNIADYNYKLPDDFTGCVIAWNSNKLDSTPSGNYNYLYRLFRKSKLKPFERDISTEIYQAGNKPCNGVAGPNCYSPLQSYGFRPTYGVGHQPYRVVVLSFELLHAPATVCGPKKSTNLVKNKCVNFNFNGLTGTGVLTESNKKFLPFQQFGRDIADTTDAVRDPQTLEILDITPCSFGGVSVITPGTNTSNQVAVLYQGVNCTEVPVAIHADQLTPTWRVYSTGSNVFQTRAGCLIGAEYVNNSYECDIPIGAGICASYQTQTKSHRRARSVASQSIIAYTMSLGAENSVAYSNNSIAIPTNFTISVTTEILPVSMTKTSVDCTMYICGDSTECSNLLLQYGSFCTQLKRALTGIAVEQDKNTQEVFAQVKQIYKTPPIKYFGGFNFSQILPDPSKPSKRSFIEDLLFNKVTLADAGFIKQYGDCLGDIAARDLICAQKFNGLTVLPPLLTDEMIAQYTSALLAGTITSGWTFGAGAALQIPFAMQMAYRFNGIGVTQNVLYENQKLIANQFNSAIGKIQDSLSSTASALGKLQDVVNHNAQALNTLVKQLSSKFGAISSVLNDILSRLDKVEAEVQIDRLITGRLQSLQTYVTQQLIRAAEIRASANLAATKMSECVLGQSKRVDFCGKGYHLMSFPQSAPHGVVFLHVTYVPAQEKNFTTAPAICHDGKAHFPREGVFVSNGTHWFVTQRNFYEPQIITTDNTFVSGNCDVVIGIVNNTVYDPLQPELDSFKEELDKYFKNHTSPDVDLGDISGINASVVNIQKEIDRLNEVAKNLNESLIDLQELGKYEQYIKWPWYIWLGFIAGLIAIVMVTIMLCCMTSCCSCLKGCCSCGSCCKFDEDDSEPVLKGVKLHYT

SEQ ID NO: 270 - protein, 1269 aa, synthetic construct
MFVFLVLLPLVSSQCVNLITRTQSYTNSFTRGVYYPDKVFRSSVLHSTQDLFLPFFSNVTWFHAIHVSGTNGTKRFDNPALPFNDGVYFASTEKSNIIRGWIFGTTLDSKTQSLLIVNNATNVVIKVCEFQFCNDPFLDVYQKNNKSWMESEFRVYSSANNCTFEYVSQPFLMDLEGKEGNFKNLREFVFKNIDGYFKIYSKHTPINLERDLPQGFSALEPLVDLPIGINITRFQTLLALHRSYLTPVDSSSGWTAGAAAYYVGYLQPRTFLLKYNENGTITDAVDCALDPLSETKCTLKSFTVEKGIYQTSNFRVQPTESIVRFPNITNLCPFHEVFNATTFASVYAWNRKRISNCVADYSVIYNFAPFFAFKCYGVSPTKLNDLCFTNVYADSFVIRGNEVSQIAPGQTGNIADYNYKLPDDFTGCVIAWNSNKLDSTPSGNYNYLYRLFRKSKLKPFERDISTEIYQAGNKPCNGVAGPNCYSPLQSYGFRPTYGVGHQPYRVVVLSFELLHAPATVCGPKKSTNLVKNKCVNFNFNGLTGTGVLTESNKKFLPFQQFGRDIADTTDAVRDPQTLEILDITPCSFGGVSVITPGTNTSNQVAVLYQGVNCTEVPVAIHADQLTPTWRVYSTGSNVFQTRAGCLIGAEYVNNSYECDIPIGAGICASYQTQTKSHQQAQSVASQSIIAYTMSLGAENSVAYSNNSIAIPTNFTISVTTEILPVSMTKTSVDCTMYICGDSTECSNLLLQYGSFCTQLKRALTGIAVEQDKNTQEVFAQVKQIYKTPPIKYFGGFNFSQILPDPSKPSKRSFIEDLLFNKVTLADAGFIKQYGDCLGDIAARDLICAQKFNGLTVLPPLLTDEMIAQYTSALLAGTITSGWTFGAGAALQIPFAMQMAYRFNGIGVTQNVLYENQKLIANQFNSAIGKIQDSLSSTASALGKLQDVVNHNAQALNTLVKQLSSKFGAISSVLNDILSRLDPPEAEVQIDRLITGRLQSLQTYVTQQLIRAAEIRASANLAATKMSECVLGQSKRVDFCGKGYHLMSFPQSAPHGVVFLHVTYVPAQEKNFTTAPAICHDGKAHFPREGVFVSNGTHWFVTQRNFYEPQIITTDNTFVSGNCDVVIGIVNNTVYDPLQPELDSFKEELDKYFKNHTSPDVDLGDISGINASVVNIQKEIDRLNEVAKNLNESLIDLQELGKYEQYIKWPWYIWLGFIAGLIAIVMVTIMLCCMTSCCSCLKGCCSCGSCCKFDEDDSEPVLKGVKLHYT

SEQ ID NO: 271 - protein, 1269 aa, synthetic construct
MFVFLVLLPLVSSQCVNLITRTQSYTNSFTRGVYYPDKVFRSSVLHSTQDLFLPFFSNVTWFHAIHVSGTNGTKRFDNPALPFNDGVYFASTEKSNIIRGWIFGTTLDSKTQSLLIVNNATNVVIKVCEFQFCNDPFLDVYQKNNKSWMESEFRVYSSANNCTFEYVSQPFLMDLEGKEGNFKNLREFVFKNIDGYFKIYSKHTPINLERDLPQGFSALEPLVDLPIGINITRFQTLLALHRSYLTPVDSSSGWTAGAAAYYVGYLQPRTFLLKYNENGTITDAVDCALDPLSETKCTLKSFTVEKGIYQTSNFRVQPTESIVRFPNITNLCPFHEVFNATTFASVYAWNRKRISNCVADYSVIYNFAPFFAFKCYGVSPTKLNDLCFTNVYADSFVIRGNEVSQIAPGQTGNIADYNYKLPDDFTGCVIAWNSNKLDSKPSGNYNYLYRLFRKSKLKPFERDISTEIYQAGNKPCNGVAGSNCYSPLQSYGFRPTYGVGHQPYRVVVLSFELLHAPATVCGPKKSTNLVKNKCVNFNFNGLTGTGVLTESNKKFLPFQQFGRDIADTTDAVRDPQTLEILDITPCSFGGVSVITPGTNTSNQVAVLYQGVNCTEVPVAIHADQLTPTWRVYSTGSNVFQTRAGCLIGAEYVNNSYECDIPIGAGICASYQTQTKSHRRARSVASQSIIAYTMSLGAENSVAYSNNSIAIPTNFTISVTTEILPVSMTKTSVDCTMYICGDSTECSNLLLQYGSFCTQLKRALTGIAVEQDKNTQEVFAQVKQIYKTPPIKYFGGFNFSQILPDPSKPSKRSFIEDLLFNKVTLADAGFIKQYGDCLGDIAARDLICAQKFNGLTVLPPLLTDEMIAQYTSALLAGTITSGWTFGAGAALQIPFAMQMAYRFNGIGVTQNVLYENQKLIANQFNSAIGKIQDSLSSTASALGKLQDVVNHNAQALNTLVKQLSSKFGAISSVLNDILSRLDKVEAEVQIDRLITGRLQSLQTYVTQQLIRAAEIRASANLAATKMSECVLGQSKRVDFCGKGYHLMSFPQSAPHGVVFLHVTYVPAQEKNFTTAPAICHDGKAHFPREGVFVSNGTHWFVTQRNFYEPQIITTDNTFVSGNCDVVIGIVNNTVYDPLQPELDSFKEELDKYFKNHTSPDVDLGDISGINASVVNIQKEIDRLNEVAKNLNESLIDLQELGKYEQYIKWPWYIWLGFIAGLIAIVMVTIMLCCMTSCCSCLKGCCSCGSCCKFDEDDSEPVLKGVKLHYT

SEQ ID NO: 272 - protein, 1269 aa, synthetic construct; identical to SEQ ID NO: 230

SEQ ID NO: 273 - protein, 1256 aa, synthetic construct
QCVNLITRTQSYTNSFTRGVYYPDKVFRSSVLHSTQDLFLPFFSNVTWFHAIHVSGTNGTKRFDNPALPFNDGVYFASTEKSNIIRGWIFGTTLDSKTQSLLIVNNATNVVIKVCEFQFCNDPFLDVYQKNNKSWMESEFRVYSSANNCTFEYVSQPFLMDLEGKEGNFKNLREFVFKNIDGYFKIYSKHTPINLERDLPQGFSALEPLVDLPIGINITRFQTLLALHRSYLTPVDSSSGWTAGAAAYYVGYLQPRTFLLKYNENGTITDAVDCALDPLSETKCTLKSFTVEKGIYQTSNFRVQPTESIVRFPNITNLCPFHEVFNATTFASVYAWNRKRISNCVADYSVIYNFAPFFAFKCYGVSPTKLNDLCFTNVYADSFVIRGNEVSQIAPGQTGNIADYNYKLPDDFTGCVIAWNSNKLDSKPSGNYNYLYRLFRKSKLKPFERDISTEIYQAGNKPCNGVAGPNCYSPLQSYGFRPTYGVGHQPYRVVVLSFELLHAPATVCGPKKSTNLVKNKCVNFNFNGLTGTGVLTESNKKFLPFQQFGRDIADTTDAVRDPQTLEILDITPCSFGGVSVITPGTNTSNQVAVLYQGVNCTEVPVAIHADQLTPTWRVYSTGSNVFQTRAGCLIGAEYVNNSYECDIPIGAGICASYQTQTKSHRRARSVASQSIIAYTMSLGAENSVAYSNNSIAIPTNFTISVTTEILPVSMTKTSVDCTMYICGDSTECSNLLLQYGSFCTQLKRALTGIAVEQDKNTQEVFAQVKQIYKTPPIKYFGGFNFSQILPDPSKPSKRSFIEDLLFNKVTLADAGFIKQYGDCLGDIAARDLICAQKFNGLTVLPPLLTDEMIAQYTSALLAGTITSGWTFGAGAALQIPFAMQMAYRFNGIGVTQNVLYENQKLIANQFNSAIGKIQDSLSSTASALGKLQDVVNHNAQALNTLVKQLSSKFGAISSVLNDILSRLDKVEAEVQIDRLITGRLQSLQTYVTQQLIRAAEIRASANLAATKMSECVLGQSKRVDFCGKGYHLMSFPQSAPHGVVFLHVTYVPAQEKNFTTAPAICHDGKAHFPREGVFVSNGTHWFVTQRNFYEPQIITTDNTFVSGNCDVVIGIVNNTVYDPLQPELDSFKEELDKYFKNHTSPDVDLGDISGINASVVNIQKEIDRLNEVAKNLNESLIDLQELGKYEQYIKWPWYIWLGFIAGLIAIVMVTIMLCCMTSCCSCLKGCCSCGSCCKFDEDDSEPVLKGVKLHYT

SEQ ID NO: 274 - protein, 1256 aa, synthetic construct
QCVNLITRTQSYTNSFTRGVYYPDKVFRSSVLHSTQDLFLPFFSNVTWFHAIHVSGTNGTKRFDNPALPFNDGVYFASTEKSNIIRGWIFGTTLDSKTQSLLIVNNATNVVIKVCEFQFCNDPFLDVYQKNNKSWMESEFRVYSSANNCTFEYVSQPFLMDLEGKEGNFKNLREFVFKNIDGYFKIYSKHTPINLERDLPQGFSALEPLVDLPIGINITRFQTLLALHRSYLTPVDSSSGWTAGAAAYYVGYLQPRTFLLKYNENGTITDAVDCALDPLSETKCTLKSFTVEKGIYQTSNFRVQPTESIVRFPNITNLCPFHEVFNATTFASVYAWNRKRISNCVADYSVIYNFAPFFAFKCYGVSPTKLNDLCFTNVYADSFVIRGNEVSQIAPGQTGNIADYNYKLPDDFTGCVIAWNSNKLDSKPSGNYNYLYRLFRKSKLKPFERDISTEIYQAGNKPCNGVAGPNCYSPLQSYGFRPTYGVGHQPYRVVVLSFELLHAPATVCGPKKSTNLVKNKCVNFNFNGLTGTGVLTESNKKFLPFQQFGRDIADTTDAVRDPQTLEILDITPCSFGGVSVITPGTNTSNQVAVLYQGVNCTEVPVAIHADQLTPTWRVYSTGSNVFQTRAGCLIGAEYVNNSYECDIPIGAGICASYQTQTKSHQQAQSVASQSIIAYTMSLGAENSVAYSNNSIAIPTNFTISVTTEILPVSMTKTSVDCTMYICGDSTECSNLLLQYGSFCTQLKRALTGIAVEQDKNTQEVFAQVKQIYKTPPIKYFGGFNFSQILPDPSKPSKRSFIEDLLFNKVTLADAGFIKQYGDCLGDIAARDLICAQKFNGLTVLPPLLTDEMIAQYTSALLAGTITSGWTFGAGAALQIPFAMQMAYRFNGIGVTQNVLYENQKLIANQFNSAIGKIQDSLSSTASALGKLQDVVNHNAQALNTLVKQLSSKFGAISSVLNDILSRLDPPEAEVQIDRLITGRLQSLQTYVTQQLIRAAEIRASANLAATKMSECVLGQSKRVDFCGKGYHLMSFPQSAPHGVVFLHVTYVPAQEKNFTTAPAICHDGKAHFPREGVFVSNGTHWFVTQRNFYEPQIITTDNTFVSGNCDVVIGIVNNTVYDPLQPELDSFKEELDKYFKNHTSPDVDLGDISGINASVVNIQKEIDRLNEVAKNLNESLIDLQELGKYEQYIKWPWYIWLGFIAGLIAIVMVTIMLCCMTSCCSCLKGCCSCGSCCKFDEDDSEPVLKGVKLHYT

SEQ ID NO: 275 - protein, 1256 aa, synthetic construct
QCVNLITRTQSYTNSFTRGVYYPDKVFRSSVLHSTQDLFLPFFSNVTWFHAIHVSGTNGTKRFDNPALPFNDGVYFASTEKSNIIRGWIFGTTLDSKTQSLLIVNNATNVVIKVCEFQFCNDPFLDVYQKNNKSWMESEFRVYSSANNCTFEYVSQPFLMDLEGKEGNFKNLREFVFKNIDGYFKIYSKHTPINLERDLPQGFSALEPLVDLPIGINITRFQTLLALHRSYLTPVDSSSGWTAGAAAYYVGYLQPRTFLLKYNENGTITDAVDCALDPLSETKCTLKSFTVEKGIYQTSNFRVQPTESIVRFPNITNLCPFHEVFNATTFASVYAWNRKRISNCVADYSVIYNFAPFFAFKCYGVSPTKLNDLCFTNVYADSFVIRGNEVSQIAPGQTGNIADYNYKLPDDFTGCVIAWNSNKLDSKPSGNYNYLYRLFRKSKLKPFERDISTEIYQAGNKPCNGVAGPNCYSPLQSYGFRPTYGVGHQPYRVVVLSFELLHASATVCGPKKSTNLVKNKCVNFNFNGLTGTGVLTESNKKFLPFQQFGRDIADTTDAVRDPQTLEILDITPCSFGGVSVITPGTNTSNQVAVLYQGVNCTEVPVAIHADQLTPTWRVYSTGSNVFQTRAGCLIGAEYVNNSYECDIPIGAGICASYQTQTKSHRRARSVASQSIIAYTMSLGAENSVAYSNNSIAIPTNFTISVTTEILPVSMTKTSVDCTMYICGDSTECSNLLLQYGSFCTQLKRALTGIAVEQDKNTQEVFAQVKQIYKTPPIKYFGGFNFSQILPDPSKPSKRSFIEDLLFNKVTLADAGFIKQYGDCLGDIAARDLICAQKFNGLTVLPPLLTDEMIAQYTSALLAGTITSGWTFGAGAALQIPFAMQMAYRFNGIGVTQNVLYENQKLIANQFNSAIGKIQDSLSSTASALGKLQDVVNHNAQALNTLVKQLSSKFGAISSVLNDILSRLDKVEAEVQIDRLITGRLQSLQTYVTQQLIRAAEIRASANLAATKMSECVLGQSKRVDFCGKGYHLMSFPQSAPHGVVFLHVTYVPAQEKNFTTAPAICHDGKAHFPREGVFVSNGTHWFVTQRNFYEPQIITTDNTFVSGNCDVVIGIVNNTVYDPLQPELDSFKEELDKYFKNHTSPDVDLGDISGINASVVNIQKEIDRLNEVAKNLNESLIDLQELGKYEQYIKWPWYIWLGFIAGLIAIVMVTIMLCCMTSCCSCLKGCCSCGSCCKFDEDDSEPVLKGVKLHYT

SEQ ID NO: 276 - protein, 1256 aa, synthetic construct
QCVNLITRTQSYTNSFTRGVYYPDKVFRSSVLHSTQDLFLPFFSNVTWFHAIHVSGTNGTKRFDNPALPFNDGVYFASTEKSNIIRGWIFGTTLDSKTQSLLIVNNATNVVIKVCEFQFCNDPFLDVYQKNNKSWMESEFRVYSSANNCTFEYVSQPFLMDLEGKEGNFKNLREFVFKNIDGYFKIYSKHTPINLERDLPQGFSALEPLVDLPIGINITRFQTLLALHRSYLTPVDSSSGWTAGAAAYYVGYLQPRTFLLKYNENGTITDAVDCALDPLSETKCTLKSFTVEKGIYQTSNFRVQPTESIVRFPNITNLCPFHEVFNATTFASVYAWNRKRISNCVADYSVIYNFAPFFAFKCYGVSPTKLNDLCFTNVYADSFVIRGNEVSQIAPGQTGNIADYNYKLPDDFTGCVIAWNSNKLDSKPSGNYNYLYRLFRKSKLKPFERDISTEIYQAGNKPCNGVAGPNCYSPLQSYGFRPTYGVGHQPYRVVVLSFELLHASATVCGPKKSTNLVKNKCVNFNFNGLTGTGVLTESNKKFLPFQQFGRDIADTTDAVRDPQTLEILDITPCSFGGVSVITPGTNTSNQVAVLYQGVNCTEVPVAIHADQLTPTWRVYSTGSNVFQTRAGCLIGAEYVNNSYECDIPIGAGICASYQTQTKSHQQAQSVASQSIIAYTMSLGAENSVAYSNNSIAIPTNFTISVTTEILPVSMTKTSVDCTMYICGDSTECSNLLLQYGSFCTQLKRALTGIAVEQDKNTQEVFAQVKQIYKTPPIKYFGGFNFSQILPDPSKPSKRSFIEDLLFNKVTLADAGFIKQYGDCLGDIAARDLICAQKFNGLTVLPPLLTDEMIAQYTSALLAGTITSGWTFGAGAALQIPFAMQMAYRFNGIGVTQNVLYENQKLIANQFNSAIGKIQDSLSSTASALGKLQDVVNHNAQALNTLVKQLSSKFGAISSVLNDILSRLDPPEAEVQIDRLITGRLQSLQTYVTQQLIRAAEIRASANLAATKMSECVLGQSKRVDFCGKGYHLMSFPQSAPHGVVFLHVTYVPAQEKNFTTAPAICHDGKAHFPREGVFVSNGTHWFVTQRNFYEPQIITTDNTFVSGNCDVVIGIVNNTVYDPLQPELDSFKEELDKYFKNHTSPDVDLGDISGINASVVNIQKEIDRLNEVAKNLNESLIDLQELGKYEQYIKWPWYIWLGFIAGLIAIVMVTIMLCCMTSCCSCLKGCCSCGSCCKFDEDDSEPVLKGVKLHYT

SEQ ID NO: 277 - protein, 1256 aa, synthetic construct
QCVNLITRTQSYTNSFTRGVYYPDKVFRSSVLHSTQDLFLPFFSNVTWFHAIHVSGTNGTKRFDNPALPFNDGVYFASTEKSNIIRGWIFGTTLDSKTQSLLIVNNATNVVIKVCEFQFCNDPFLDVYQKNNKSWMESEFRVYSSANNCTFEYVSQPFLMDLEGKEGNFKNLREFVFKNIDGYFKIYSKHTPINLERDLPQGFSALEPLVDLPIGINITRFQTLLALHRSYLTPVDSSSGWTAGAAAYYVGYLQPRTFLLKYNENGTITDAVDCALDPLSETKCTLKSFTVEKGIYQTSNFRVQPTESIVRFPNITNLCPFHEVFNATTFASVYAWNRKRISNCVADYSVIYNFAPFFAFKCYGVSPTKLNDLCFTNVYADSFVIRGNEVSQIAPGQTGNIADYNYKLPDDFTGCVIAWNSNKLDSTPSGNYNYLYRLFRKSKLKPFERDISTEIYQAGNKPCNGVAGPNCYSPLQSYGFRPTYGVGHQPYRVVVLSFELLHAPATVCGPKKSTNLVKNKCVNFNFNGLTGTGVLTESNKKFLPFQQFGRDIADTTDAVRDPQTLEILDITPCSFGGVSVITPGTNTSNQVAVLYQGVNCTEVPVAIHADQLTPTWRVYSTGSNVFQTRAGCLIGAEYVNNSYECDIPIGAGICASYQTQTKSHRRARSVASQSIIAYTMSLGAENSVAYSNNSIAIPTNFTISVTTEILPVSMTKTSVDCTMYICGDSTECSNLLLQYGSFCTQLKRALTGIAVEQDKNTQEVFAQVKQIYKTPPIKYFGGFNFSQILPDPSKPSKRSFIEDLLFNKVTLADAGFIKQYGDCLGDIAARDLICAQKFNGLTVLPPLLTDEMIAQYTSALLAGTITSGWTFGAGAALQIPFAMQMAYRFNGIGVTQNVLYENQKLIANQFNSAIGKIQDSLSSTASALGKLQDVVNHNAQALNTLVKQLSSKFGAISSVLNDILSRLDKVEAEVQIDRLITGRLQSLQTYVTQQLIRAAEIRASANLAATKMSECVLGQSKRVDFCGKGYHLMSFPQSAPHGVVFLHVTYVPAQEKNFTTAPAICHDGKAHFPREGVFVSNGTHWFVTQRNFYEPQIITTDNTFVSGNCDVVIGIVNNTVYDPLQPELDSFKEELDKYFKNHTSPDVDLGDISGINASVVNIQKEIDRLNEVAKNLNESLIDLQELGKYEQYIKWPWYIWLGFIAGLIAIVMVTIMLCCMTSCCSCLKGCCSCGSCCKFDEDDSEPVLKGVKLHYT

SEQ ID NO: 278 - protein, 1256 aa, synthetic construct
QCVNLITRTQSYTNSFTRGVYYPDKVFRSSVLHSTQDLFLPFFSNVTWFHAIHVSGTNGTKRFDNPALPFNDGVYFASTEKSNIIRGWIFGTTLDSKTQSLLIVNNATNVVIKVCEFQFCNDPFLDVYQKNNKSWMESEFRVYSSANNCTFEYVSQPFLMDLEGKEGNFKNLREFVFKNIDGYFKIYSKHTPINLERDLPQGFSALEPLVDLPIGINITRFQTLLALHRSYLTPVDSSSGWTAGAAAYYVGYLQPRTFLLKYNENGTITDAVDCALDPLSETKCTLKSFTVEKGIYQTSNFRVQPTESIVRFPNITNLCPFHEVFNATTFASVYAWNRKRISNCVADYSVIYNFAPFFAFKCYGVSPTKLNDLCFTNVYADSFVIRGNEVSQIAPGQTGNIADYNYKLPDDFTGCVIAWNSNKLDSTPSGNYNYLYRLFRKSKLKPFERDISTEIYQAGNKPCNGVAGPNCYSPLQSYGFRPTYGVGHQPYRVVVLSFELLHAPATVCGPKKSTNLVKNKCVNFNFNGLTGTGVLTESNKKFLPFQQFGRDIADTTDAVRDPQTLEILDITPCSFGGVSVITPGTNTSNQVAVLYQGVNCTEVPVAIHADQLTPTWRVYSTGSNVFQTRAGCLIGAEYVNNSYECDIPIGAGICASYQTQTKSHQQAQSVASQSIIAYTMSLGAENSVAYSNNSIAIPTNFTISVTTEILPVSMTKTSVDCTMYICGDSTECSNLLLQYGSFCTQLKRALTGIAVEQDKNTQEVFAQVKQIYKTPPIKYFGGFNFSQILPDPSKPSKRSFIEDLLFNKVTLADAGFIKQYGDCLGDIAARDLICAQKFNGLTVLPPLLTDEMIAQYTSALLAGTITSGWTFGAGAALQIPFAMQMAYRFNGIGVTQNVLYENQKLIANQFNSAIGKIQDSLSSTASALGKLQDVVNHNAQALNTLVKQLSSKFGAISSVLNDILSRLDPPEAEVQIDRLITGRLQSLQTYVTQQLIRAAEIRASANLAATKMSECVLGQSKRVDFCGKGYHLMSFPQSAPHGVVFLHVTYVPAQEKNFTTAPAICHDGKAHFPREGVFVSNGTHWFVTQRNFYEPQIITTDNTFVSGNCDVVIGIVNNTVYDPLQPELDSFKEELDKYFKNHTSPDVDLGDISGINASVVNIQKEIDRLNEVAKNLNESLIDLQELGKYEQYIKWPWYIWLGFIAGLIAIVMVTIMLCCMTSCCSCLKGCCSCGSCCKFDEDDSEPVLKGVKLHYT

SEQ ID NO: 279 - protein, 1256 aa, synthetic construct
QCVNLITRTQSYTNSFTRGVYYPDKVFRSSVLHSTQDLFLPFFSNVTWFHAIHVSGTNGTKRFDNPALPFNDGVYFASTEKSNIIRGWIFGTTLDSKTQSLLIVNNATNVVIKVCEFQFCNDPFLDVYQKNNKSWMESEFRVYSSANNCTFEYVSQPFLMDLEGKEGNFKNLREFVFKNIDGYFKIYSKHTPINLERDLPQGFSALEPLVDLPIGINITRFQTLLALHRSYLTPVDSSSGWTAGAAAYYVGYLQPRTFLLKYNENGTITDAVDCALDPLSETKCTLKSFTVEKGIYQTSNFRVQPTESIVRFPNITNLCPFHEVFNATTFASVYAWNRKRISNCVADYSVIYNFAPFFAFKCYGVSPTKLNDLCFTNVYADSFVIRGNEVSQIAPGQTGNIADYNYKLPDDFTGCVIAWNSNKLDSKPSGNYNYLYRLFRKSKLKPFERDISTEIYQAGNKPCNGVAGSNCYSPLQSYGFRPTYGVGHQPYRVVVLSFELLHAPATVCGPKKSTNLVKNKCVNFNFNGLTGTGVLTESNKKFLPFQQFGRDIADTTDAVRDPQTLEILDITPCSFGGVSVITPGTNTSNQVAVLYQGVNCTEVPVAIHADQLTPTWRVYSTGSNVFQTRAGCLIGAEYVNNSYECDIPIGAGICASYQTQTKSHRRARSVASQSIIAYTMSLGAENSVAYSNNSIAIPTNFTISVTTEILPVSMTKTSVDCTMYICGDSTECSNLLLQYGSFCTQLKRALTGIAVEQDKNTQEVFAQVKQIYKTPPIKYFGGFNFSQILPDPSKPSKRSFIEDLLFNKVTLADAGFIKQYGDCLGDIAARDLICAQKFNGLTVLPPLLTDEMIAQYTSALLAGTITSGWTFGAGAALQIPFAMQMAYRFNGIGVTQNVLYENQKLIANQFNSAIGKIQDSLSSTASALGKLQDVVNHNAQALNTLVKQLSSKFGAISSVLNDILSRLDKVEAEVQIDRLITGRLQSLQTYVTQQLIRAAEIRASANLAATKMSECVLGQSKRVDFCGKGYHLMSFPQSAPHGVVFLHVTYVPAQEKNFTTAPAICHDGKAHFPREGVFVSNGTHWFVTQRNFYEPQIITTDNTFVSGNCDVVIGIVNNTVYDPLQPELDSFKEELDKYFKNHTSPDVDLGDISGINASVVNIQKEIDRLNEVAKNLNESLIDLQELGKYEQYIKWPWYIWLGFIAGLIAIVMVTIMLCCMTSCCSCLKGCCSCGSCCKFDEDDSEPVLKGVKLHYT

SEQ ID NO: 280 - protein, 1256 aa, synthetic construct; identical to SEQ ID NO: 234

SEQ ID NO: 281 - protein, 1269 aa, synthetic construct
MFVFLVLLPLVSSQCVNLITRTQSYTNSFTRGVYYPDKVFRSSVLHSTQDLFLPFFSNVTWFHAIHVSGTNGTKRFDNPALPFNDGVYFASTEKSNIIRGWIFGTTLDSKTQSLLIVNNATNVVIKVCEFQFCNDPFLDVYQKNNKSWMESEFRVYSSANNCTFEYVSQPFLMDLEGKEGNFKNLREFVFKNIDGYFKIYSKHTPINLERDLPQGFSALEPLVDLPIGINITRFQTLLALHRSYLTPGGSSSGWTAGAAAYYVGYLQPRTFLLKYNENGTITDAVDCALDPLSETKCTLKSFTVEKGIYQTSNFRVQPTESIVRFPNITNLCPFHEVFNATTFASVYAWNRKRISNCVADYSVIYNFAPFFAFKCYGVSPTKLNDLCFTNVYADSFVIRGNEVSQIAPGQTGNIADYNYKLPDDFTGCVIAWNSNKLDSKPSGNYNYLYRLFRKSKLKPFERDISTEIYQAGNKPCNGVAGPNCYSPLQSYGFRPTYGVGHQPYRVVVLSFELLHASATVCGPKKSTNLVKNKCVNFNFNGLTGTGVLTESNKKFLPFQQFGRDIADTTDAVRDPQTLEILDITPCSFGGVSVITPGTNTSNQVAVLYQGVNCTEVPVAIHADQLTPTWRVYSTGSNVFQTRAGCLIGAEYVNNSYECDIPIGAGICASYQTQTKSHRRARSVASQSIIAYTMSLGAENSVAYSNNSIAIPTNFTISVTTEILPVSMTKTSVDCTMYICGDSTECSNLLLQYGSFCTQLKRALTGIAVEQDKNTQEVFAQVKQIYKTPPIKYFGGFNFSQILPDPSKPSKRSFIEDLLFNKVTLADAGFIKQYGDCLGDIAARDLICAQKFNGLTVLPPLLTDEMIAQYTSALLAGTITSGWTFGAGAALQIPFAMQMAYRFNGIGVTQNVLYENQKLIANQFNSAIGKIQDSLSSTASALGKLQDVVNHNAQALNTLVKQLSSKFGAISSVLNDILSRLDKVEAEVQIDRLITGRLQSLQTYVTQQLIRAAEIRASANLAATKMSECVLGQSKRVDFCGKGYHLMSFPQSAPHGVVFLHVTYVPAQEKNFTTAPAICHDGKAHFPREGVFVSNGTHWFVTQRNFYEPQIITTDNTFVSGNCDVVIGIVNNTVYDPLQPELDSFKEELDKYFKNHTSPDVDLGDISGINASVVNIQKEIDRLNEVAKNLNESLIDLQELGKYEQYIKWPWYIWLGFIAGLIAIVMVTIMLCCMTSCCSCLKGCCSCGSCCKFDEDDSEPVLKGVKLHYT

SEQ ID NO: 282 - protein, 1269 aa, synthetic construct
MFVFLVLLPLVSSQCVNLITRTQSYTNSFTRGVYYPDKVFRSSVLHSTQDLFLPFFSNVTWFHAIHVSGTNGTKRFDNPALPFNDGVYFASTEKSNIIRGWIFGTTLDSKTQSLLIVNNATNVVIKVCEFQFCNDPFLDVYQKNNKSWMESEFRVYSSANNCTFEYVSQPFLMDLEGKEGNFKNLREFVFKNIDGYFKIYSKHTPINLERDLPQGFSALEPLVDLPIGINITRFQTLLALHRSYLTPGGSSSGWTAGAAAYYVGYLQPRTFLLKYNENGTITDAVDCALDPLSETKCTLKSFTVEKGIYQTSNFRVQPTESIVRFPNITNLCPFHEVFNATTFASVYAWNRKRISNCVADYSVIYNFAPFFAFKCYGVSPTKLNDLCFTNVYADSFVIRGNEVSQIAPGQTGNIADYNYKLPDDFTGCVIAWNSNKLDSKPSGNYNYLYRLFRKSKLKPFERDISTEIYQAGNKPCNGVAGPNCYSPLQSYGFRPTYGVGHQPYRVVVLSFELLHASATVCGPKKSTNLVKNKCVNFNFNGLTGTGVLTESNKKFLPFQQFGRDIADTTDAVRDPQTLEILDITPCSFGGVSVITPGTNTSNQVAVLYQGVNCTEVPVAIHADQLTPTWRVYSTGSNVFQTRAGCLIGAEYVNNSYECDIPIGAGICASYQTQTKSHQQAQSVASQSIIAYTMSLGAENSVAYSNNSIAIPTNFTISVTTEILPVSMTKTSVDCTMYICGDSTECSNLLLQYGSFCTQLKRALTGIAVEQDKNTQEVFAQVKQIYKTPPIKYFGGFNFSQILPDPSKPSKRSFIEDLLFNKVTLADAGFIKQYGDCLGDIAARDLICAQKFNGLTVLPPLLTDEMIAQYTSALLAGTITSGWTFGAGAALQIPFAMQMAYRFNGIGVTQNVLYENQKLIANQFNSAIGKIQDSLSSTASALGKLQDVVNHNAQALNTLVKQLSSKFGAISSVLNDILSRLDPPEAEVQIDRLITGRLQSLQTYVTQQLIRAAEIRASANLAATKMSECVLGQSKRVDFCGKGYHLMSFPQSAPHGVVFLHVTYVPAQEKNFTTAPAICHDGKAHFPREGVFVSNGTHWFVTQRNFYEPQIITTDNTFVSGNCDVVIGIVNNTVYDPLQPELDSFKEELDKYFKNHTSPDVDLGDISGINASVVNIQKEIDRLNEVAKNLNESLIDLQELGKYEQYIKWPWYIWLGFIAGLIAIVMVTIMLCCMTSCCSCLKGCCSCGSCCKFDEDDSEPVLKGVKLHYT

SEQ ID NO: 283 - protein, 1256 aa, synthetic construct
QCVNLITRTQSYTNSFTRGVYYPDKVFRSSVLHSTQDLFLPFFSNVTWFHAIHVSGTNGTKRFDNPALPFNDGVYFASTEKSNIIRGWIFGTTLDSKTQSLLIVNNATNVVIKVCEFQFCNDPFLDVYQKNNKSWMESEFRVYSSANNCTFEYVSQPFLMDLEGKEGNFKNLREFVFKNIDGYFKIYSKHTPINLERDLPQGFSALEPLVDLPIGINITRFQTLLALHRSYLTPGGSSSGWTAGAAAYYVGYLQPRTFLLKYNENGTITDAVDCALDPLSETKCTLKSFTVEKGIYQTSNFRVQPTESIVRFPNITNLCPFHEVFNATTFASVYAWNRKRISNCVADYSVIYNFAPFFAFKCYGVSPTKLNDLCFTNVYADSFVIRGNEVSQIAPGQTGNIADYNYKLPDDFTGCVIAWNSNKLDSKPSGNYNYLYRLFRKSKLKPFERDISTEIYQAGNKPCNGVAGPNCYSPLQSYGFRPTYGVGHQPYRVVVLSFELLHASATVCGPKKSTNLVKNKCVNFNFNGLTGTGVLTESNKKFLPFQQFGRDIADTTDAVRDPQTLEILDITPCSFGGVSVITPGTNTSNQVAVLYQGVNCTEVPVAIHADQLTPTWRVYSTGSNVFQTRAGCLIGAEYVNNSYECDIPIGAGICASYQTQTKSHRRARSVASQSIIAYTMSLGAENSVAYSNNSIAIPTNFTISVTTEILPVSMTKTSVDCTMYICGDSTECSNLLLQYGSFCTQLKRALTGIAVEQDKNTQEVFAQVKQIYKTPPIKYFGGFNFSQILPDPSKPSKRSFIEDLLFNKVTLADAGFIKQYGDCLGDIAARDLICAQKFNGLTVLPPLLTDEMIAQYTSALLAGTITSGWTFGAGAALQIPFAMQMAYRFNGIGVTQNVLYENQKLIANQFNSAIGKIQDSLSSTASALGKLQDVVNHNAQALNTLVKQLSSKFGAISSVLNDILSRLDKVEAEVQIDRLITGRLQSLQTYVTQQLIRAAEIRASANLAATKMSECVLGQSKRVDFCGKGYHLMSFPQSAPHGVVFLHVTYVPAQEKNFTTAPAICHDGKAHFPREGVFVSNGTHWFVTQRNFYEPQIITTDNTFVSGNCDVVIGIVNNTVYDPLQPELDSFKEELDKYFKNHTSPDVDLGDISGINASVVNIQKEIDRLNEVAKNLNESLIDLQELGKYEQYIKWPWYIWLGFIAGLIAIVMVTIMLCCMTSCCSCLKGCCSCGSCCKFDEDDSEPVLKGVKLHYT

SEQ ID NO: 284 - protein, 1256 aa, synthetic construct
QCVNLITRTQSYTNSFTRGVYYPDKVFRSSVLHSTQDLFLPFFSNVTWFHAIHVSGTNGTKRFDNPALPFNDGVYFASTEKSNIIRGWIFGTTLDSKTQSLLIVNNATNVVIKVCEFQFCNDPFLDVYQKNNKSWMESEFRVYSSANNCTFEYVSQPFLMDLEGKEGNFKNLREFVFKNIDGYFKIYSKHTPINLERDLPQGFSALEPLVDLPIGINITRFQTLLALHRSYLTPGGSSSGWTAGAAAYYVGYLQPRTFLLKYNENGTITDAVDCALDPLSETKCTLKSFTVEKGIYQTSNFRVQPTESIVRFPNITNLCPFHEVFNATTFASVYAWNRKRISNCVADYSVIYNFAPFFAFKCYGVSPTKLNDLCFTNVYADSFVIRGNEVSQIAPGQTGNIADYNYKLPDDFTGCVIAWNSNKLDSKPSGNYNYLYRLFRKSKLKPFERDISTEIYQAGNKPCNGVAGPNCYSPLQSYGFRPTYGVGHQPYRVVVLSFELLHASATVCGPKKSTNLVKNKCVNFNFNGLTGTGVLTESNKKFLPFQQFGRDIADTTDAVRDPQTLEILDITPCSFGGVSVITPGTNTSNQVAVLYQGVNCTEVPVAIHADQLTPTWRVYSTGSNVFQTRAGCLIGAEYVNNSYECDIPIGAGICASYQTQTKSHQQAQSVASQSIIAYTMSLGAENSVAYSNNSIAIPTNFTISVTTEILPVSMTKTSVDCTMYICGDSTECSNLLLQYGSFCTQLKRALTGIAVEQDKNTQEVFAQVKQIYKTPPIKYFGGFNFSQILPDPSKPSKRSFIEDLLFNKVTLADAGFIKQYGDCLGDIAARDLICAQKFNGLTVLPPLLTDEMIAQYTSALLAGTITSGWTFGAGAALQIPFAMQMAYRFNGIGVTQNVLYENQKLIANQFNSAIGKIQDSLSSTASALGKLQDVVNHNAQALNTLVKQLSSKFGAISSVLNDILSRLDPPEAEVQIDRLITGRLQSLQTYVTQQLIRAAEIRASANLAATKMSECVLGQSKRVDFCGKGYHLMSFPQSAPHGVVFLHVTYVPAQEKNFTTAPAICHDGKAHFPREGVFVSNGTHWFVTQRNFYEPQIITTDNTFVSGNCDVVIGIVNNTVYDPLQPELDSFKEELDKYFKNHTSPDVDLGDISGINASVVNIQKEIDRLNEVAKNLNESLIDLQELGKYEQYIKWPWYIWLGFIAGLIAIVMVTIMLCCMTSCCSCLKGCCSCGSCCKFDEDDSEPVLKGVKLHYT

SEQ ID NO: 285 - protein, 1269 aa, synthetic construct
MFVFLVLLPLVSSQCVNLITRTQSYTNSFTRGVYYPDKVFRSSVLHSTQDLFLPFFSNVTWFHAIHVSGTNGTKRFDNPALPFNDGVYFASTEKSNIIRGWIFGTTLDSKTQSLLIVNNATNVVIKVCEFQFCNDPFLDVYQKNNKSWMESEFRVYSSANNCTFEYVSQPFLMDLEGKEGNFKNLREFVFKNIDGYFKIYSKHTPINLERDLPQGFSALEPLVDLPIGINITRFQTLLALHRSYLTPGGSSSGWTAGAAAYYVGYLQPRTFLLKYNENGTITDAVDCALDPLSETKCTLKSFTVEKGIYQTSNFRVQPTESIVRFPNITNLCPFHEVFNATTFASVYAWNRKRISNCVADYSVIYNFAPFFAFKCYGVSPTKLNDLCFTNVYADSFVIRGNEVSQIAPGQTGNIADYNYKLPDDFTGCVIAWNSNKLDSTPSGNYNYLYRLFRKSKLKPFERDISTEIYQAGNKPCNGVAGPNCYSPLQSYGFRPTYGVGHQPYRVVVLSFELLHASATVCGPKKSTNLVKNKCVNFNFNGLTGTGVLTESNKKFLPFQQFGRDIADTTDAVRDPQTLEILDITPCSFGGVSVITPGTNTSNQVAVLYQGVNCTEVPVAIHADQLTPTWRVYSTGSNVFQTRAGCLIGAEYVNNSYECDIPIGAGICASYQTQTKSHRRARSVASQSIIAYTMSLGAENSVAYSNNSIAIPTNFTISVTTEILPVSMTKTSVDCTMYICGDSTECSNLLLQYGSFCTQLKRALTGIAVEQDKNTQEVFAQVKQIYKTPPIKYFGGFNFSQILPDPSKPSKRSFIEDLLFNKVTLADAGFIKQYGDCLGDIAARDLICAQKFNGLTVLPPLLTDEMIAQYTSALLAGTITSGWTFGAGAALQIPFAMQMAYRFNGIGVTQNVLYENQKLIANQFNSAIGKIQDSLSSTASALGKLQDVVNHNAQALNTLVKQLSSKFGAISSVLNDILSRLDKVEAEVQIDRLITGRLQSLQTYVTQQLIRAAEIRASANLAATKMSECVLGQSKRVDFCGKGYHLMSFPQSAPHGVVFLHVTYVPAQEKNFTTAPAICHDGKAHFPREGVFVSNGTHWFVTQRNFYEPQIITTDNTFVSGNCDVVIGIVNNTVYDPLQPELDSFKEELDKYFKNHTSPDVDLGDISGINASVVNIQKEIDRLNEVAKNLNESLIDLQELGKYEQYIKWPWYIWLGFIAGLIAIVMVTIMLCCMTSCCSCLKGCCSCGSCCKFDEDDSEPVLKGVKLHYT

SEQ ID NO: 286 - protein, 1269 aa, synthetic construct
MFVFLVLLPLVSSQCVNLITRTQSYTNSFTRGVYYPDKVFRSSVLHSTQDLFLPFFSNVTWFHAIHVSGTNGTKRFDNPALPFNDGVYFASTEKSNIIRGWIFGTTLDSKTQSLLIVNNATNVVIKVCEFQFCNDPFLDVYQKNNKSWMESEFRVYSSANNCTFEYVSQPFLMDLEGKEGNFKNLREFVFKNIDGYFKIYSKHTPINLERDLPQGFSALEPLVDLPIGINITRFQTLLALHRSYLTPGGSSSGWTAGAAAYYVGYLQPRTFLLKYNENGTITDAVDCALDPLSETKCTLKSFTVEKGIYQTSNFRVQPTESIVRFPNITNLCPFHEVFNATTFASVYAWNRKRISNCVADYSVIYNFAPFFAFKCYGVSPTKLNDLCFTNVYADSFVIRGNEVSQIAPGQTGNIADYNYKLPDDFTGCVIAWNSNKLDSTPSGNYNYLYRLFRKSKLKPFERDISTEIYQAGNKPCNGVAGPNCYSPLQSYGFRPTYGVGHQPYRVVVLSFELLHASATVCGPKKSTNLVKNKCVNFNFNGLTGTGVLTESNKKFLPFQQFGRDIADTTDAVRDPQTLEILDITPCSFGGVSVITPGTNTSNQVAVLYQGVNCTEVPVAIHADQLTPTWRVYSTGSNVFQTRAGCLIGAEYVNNSYECDIPIGAGICASYQTQTKSHQQAQSVASQSIIAYTMSLGAENSVAYSNNSIAIPTNFTISVTTEILPVSMTKTSVDCTMYICGDSTECSNLLLQYGSFCTQLKRALTGIAVEQDKNTQEVFAQVKQIYKTPPIKYFGGFNFSQILPDPSKPSKRSFIEDLLFNKVTLADAGFIKQYGDCLGDIAARDLICAQKFNGLTVLPPLLTDEMIAQYTSALLAGTITSGWTFGAGAALQIPFAMQMAYRFNGIGVTQNVLYENQKLIANQFNSAIGKIQDSLSSTASALGKLQDVVNHNAQALNTLVKQLSSKFGAISSVLNDILSRLDPPEAEVQIDRLITGRLQSLQTYVTQQLIRAAEIRASANLAATKMSECVLGQSKRVDFCGKGYHLMSFPQSAPHGVVFLHVTYVPAQEKNFTTAPAICHDGKAHFPREGVFVSNGTHWFVTQRNFYEPQIITTDNTFVSGNCDVVIGIVNNTVYDPLQPELDSFKEELDKYFKNHTSPDVDLGDISGINASVVNIQKEIDRLNEVAKNLNESLIDLQELGKYEQYIKWPWYIWLGFIAGLIAIVMVTIMLCCMTSCCSCLKGCCSCGSCCKFDEDDSEPVLKGVKLHYT

SEQ ID NO: 287 - protein, 1256 aa, synthetic construct
QCVNLITRTQSYTNSFTRGVYYPDKVFRSSVLHSTQDLFLPFFSNVTWFHAIHVSGTNGTKRFDNPALPFNDGVYFASTEKSNIIRGWIFGTTLDSKTQSLLIVNNATNVVIKVCEFQFCNDPFLDVYQKNNKSWMESEFRVYSSANNCTFEYVSQPFLMDLEGKEGNFKNLREFVFKNIDGYFKIYSKHTPINLERDLPQGFSALEPLVDLPIGINITRFQTLLALHRSYLTPGGSSSGWTAGAAAYYVGYLQPRTFLLKYNENGTITDAVDCALDPLSETKCTLKSFTVEKGIYQTSNFRVQPTESIVRFPNITNLCPFHEVFNATTFASVYAWNRKRISNCVADYSVIYNFAPFFAFKCYGVSPTKLNDLCFTNVYADSFVIRGNEVSQIAPGQTGNIADYNYKLPDDFTGCVIAWNSNKLDSTPSGNYNYLYRLFRKSKLKPFERDISTEIYQAGNKPCNGVAGPNCYSPLQSYGFRPTYGVGHQPYRVVVLSFELLHASATVCGPKKSTNLVKNKCVNFNFNGLTGTGVLTESNKKFLPFQQFGRDIADTTDAVRDPQTLEILDITPCSFGGVSVITPGTNTSNQVAVLYQGVNCTEVPVAIHADQLTPTWRVYSTGSNVFQTRAGCLIGAEYVNNSYECDIPIGAGICASYQTQTKSHRRARSVASQSIIAYTMSLGAENSVAYSNNSIAIPTNFTISVTTEILPVSMTKTSVDCTMYICGDSTECSNLLLQYGSFCTQLKRALTGIAVEQDKNTQEVFAQVKQIYKTPPIKYFGGFNFSQILPDPSKPSKRSFIEDLLFNKVTLADAGFIKQYGDCLGDIAARDLICAQKFNGLTVLPPLLTDEMIAQYTSALLAGTITSGWTFGAGAALQIPFAMQMAYRFNGIGVTQNVLYENQKLIANQFNSAIGKIQDSLSSTASALGKLQDVVNHNAQALNTLVKQLSSKFGAISSVLNDILSRLDKVEAEVQIDRLITGRLQSLQTYVTQQLIRAAEIRASANLAATKMSECVLGQSKRVDFCGKGYHLMSFPQSAPHGVVFLHVTYVPAQEKNFTTAPAICHDGKAHFPREGVFVSNGTHWFVTQRNFYEPQIITTDNTFVSGNCDVVIGIVNNTVYDPLQPELDSFKEELDKYFKNHTSPDVDLGDISGINASVVNIQKEIDRLNEVAKNLNESLIDLQELGKYEQYIKWPWYIWLGFIAGLIAIVMVTIMLCCMTSCCSCLKGCCSCGSCCKFDEDDSEPVLKGVKLHYT

SEQ ID NO: 288 - protein, 1256 aa, synthetic construct
QCVNLITRTQSYTNSFTRGVYYPDKVFRSSVLHSTQDLFLPFFSNVTWFHAIHVSGTNGTKRFDNPALPFNDGVYFASTEKSNIIRGWIFGTTLDSKTQSLLIVNNATNVVIKVCEFQFCNDPFLDVYQKNNKSWMESEFRVYSSANNCTFEYVSQPFLMDLEGKEGNFKNLREFVFKNIDGYFKIYSKHTPINLERDLPQGFSALEPLVDLPIGINITRFQTLLALHRSYLTPGGSSSGWTAGAAAYYVGYLQPRTFLLKYNENGTITDAVDCALDPLSETKCTLKSFTVEKGIYQTSNFRVQPTESIVRFPNITNLCPFHEVFNATTFASVYAWNRKRISNCVADYSVIYNFAPFFAFKCYGVSPTKLNDLCFTNVYADSFVIRGNEVSQIAPGQTGNIADYNYKLPDDFTGCVIAWNSNKLDSTPSGNYNYLYRLFRKSKLKPFERDISTEIYQAGNKPCNGVAGPNCYSPLQSYGFRPTYGVGHQPYRVVVLSFELLHASATVCGPKKSTNLVKNKCVNFNFNGLTGTGVLTESNKKFLPFQQFGRDIADTTDAVRDPQTLEILDITPCSFGGVSVITPGTNTSNQVAVLYQGVNCTEVPVAIHADQLTPTWRVYSTGSNVFQTRAGCLIGAEYVNNSYECDIPIGAGICASYQTQTKSHQQAQSVASQSIIAYTMSLGAENSVAYSNNSIAIPTNFTISVTTEILPVSMTKTSVDCTMYICGDSTECSNLLLQYGSFCTQLKRALTGIAVEQDKNTQEVFAQVKQIYKTPPIKYFGGFNFSQILPDPSKPSKRSFIEDLLFNKVTLADAGFIKQYGDCLGDIAARDLICAQKFNGLTVLPPLLTDEMIAQYTSALLAGTITSGWTFGAGAALQIPFAMQMAYRFNGIGVTQNVLYENQKLIANQFNSAIGKIQDSLSSTASALGKLQDVVNHNAQALNTLVKQLSSKFGAISSVLNDILSRLDPPEAEVQIDRLITGRLQSLQTYVTQQLIRAAEIRASANLAATKMSECVLGQSKRVDFCGKGYHLMSFPQSAPHGVVFLHVTYVPAQEKNFTTAPAICHDGKAHFPREGVFVSNGTHWFVTQRNFYEPQIITTDNTFVSGNCDVVIGIVNNTVYDPLQPELDSFKEELDKYFKNHTSPDVDLGDISGINASVVNIQKEIDRLNEVAKNLNESLIDLQELGKYEQYIKWPWYIWLGFIAGLIAIVMVTIMLCCMTSCCSCLKGCCSCGSCCKFDEDDSEPVLKGVKLHYT

SEQ ID NO: 289 - protein, 1269 aa, synthetic construct
MFVFLVLLPLVSSQCVNLITRTQSYTNSFTRGVYYPDKVFRSSVLHSTQDLFLPFFSNVTWFHAIHVSGTNGTKRFDNPALPFNDGVYFASTEKSNIIRGWIFGTTLDSKTQSLLIVNNATNVVIKVCEFQFCNDPFLDVYQKNNKSWMESEFRVYSSANNCTFEYVSQPFLMDLEGKEGNFKNLREFVFKNIDGYFKIYSKHTPINLERDLPQGFSALEPLVDLPIGINITRFQTLLALHRSYLTPGGSSSGWTAGAAAYYVGYLQPRTFLLKYNENGTITDAVDCALDPLSETKCTLKSFTVEKGIYQTSNFRVQPTESIVRFPNITNLCPFHEVFNATTFASVYAWNRKRISNCVADYSVIYNFAPFFAFKCYGVSPTKLNDLCFTNVYADSFVIRGNEVSQIAPGQTGNIADYNYKLPDDFTGCVIAWNSNKLDSKPSGNYNYLYRLFRKSKLKPFERDISTEIYQAGNKPCNGVAGSNCYSPLQSYGFRPTYGVGHQPYRVVVLSFELLHASATVCGPKKSTNLVKNKCVNFNFNGLTGTGVLTESNKKFLPFQQFGRDIADTTDAVRDPQTLEILDITPCSFGGVSVITPGTNTSNQVAVLYQGVNCTEVPVAIHADQLTPTWRVYSTGSNVFQTRAGCLIGAEYVNNSYECDIPIGAGICASYQTQTKSHRRARSVASQSIIAYTMSLGAENSVAYSNNSIAIPTNFTISVTTEILPVSMTKTSVDCTMYICGDSTECSNLLLQYGSFCTQLKRALTGIAVEQDKNTQEVFAQVKQIYKTPPIKYFGGFNFSQILPDPSKPSKRSFIEDLLFNKVTLADAGFIKQYGDCLGDIAARDLICAQKFNGLTVLPPLLTDEMIAQYTSALLAGTITSGWTFGAGAALQIPFAMQMAYRFNGIGVTQNVLYENQKLIANQFNSAIGKIQDSLSSTASALGKLQDVVNHNAQALNTLVKQLSSKFGAISSVLNDILSRLDKVEAEVQIDRLITGRLQSLQTYVTQQLIRAAEIRASANLAATKMSECVLGQSKRVDFCGKGYHLMSFPQSAPHGVVFLHVTYVPAQEKNFTTAPAICHDGKAHFPREGVFVSNGTHWFVTQRNFYEPQIITTDNTFVSGNCDVVIGIVNNTVYDPLQPELDSFKEELDKYFKNHTSPDVDLGDISGINASVVNIQKEIDRLNEVAKNLNESLIDLQELGKYEQYIKWPWYIWLGFIAGLIAIVMVTIMLCCMTSCCSCLKGCCSCGSCCKFDEDDSEPVLKGVKLHYT

SEQ ID NO: 290 - protein, 1269 aa, synthetic construct
MFVFLVLLPLVSSQCVNLITRTQSYTNSFTRGVYYPDKVFRSSVLHSTQDLFLPFFSNVTWFHAIHVSGTNGTKRFDNPALPFNDGVYFASTEKSNIIRGWIFGTTLDSKTQSLLIVNNATNVVIKVCEFQFCNDPFLDVYQKNNKSWMESEFRVYSSANNCTFEYVSQPFLMDLEGKEGNFKNLREFVFKNIDGYFKIYSKHTPINLERDLPQGFSALEPLVDLPIGINITRFQTLLALHRSYLTPGGSSSGWTAGAAAYYVGYLQPRTFLLKYNENGTITDAVDCALDPLSETKCTLKSFTVEKGIYQTSNFRVQPTESIVRFPNITNLCPFHEVFNATTFASVYAWNRKRISNCVADYSVIYNFAPFFAFKCYGVSPTKLNDLCFTNVYADSFVIRGNEVSQIAPGQTGNIADYNYKLPDDFTGCVIAWNSNKLDSKPSGNYNYLYRLFRKSKLKPFERDISTEIYQAGNKPCNGVAGSNCYSPLQSYGFRPTYGVGHQPYRVVVLSFELLHASATVCGPKKSTNLVKNKCVNFNFNGLTGTGVLTESNKKFLPFQQFGRDIADTTDAVRDPQTLEILDITPCSFGGVSVITPGTNTSNQVAVLYQGVNCTEVPVAIHADQLTPTWRVYSTGSNVFQTRAGCLIGAEYVNNSYECDIPIGAGICASYQTQTKSHQQAQSVASQSIIAYTMSLGAENSVAYSNNSIAIPTNFTISVTTEILPVSMTKTSVDCTMYICGDSTECSNLLLQYGSFCTQLKRALTGIAVEQDKNTQEVFAQVKQIYKTPPIKYFGGFNFSQILPDPSKPSKRSFIEDLLFNKVTLADAGFIKQYGDCLGDIAARDLICAQKFNGLTVLPPLLTDEMIAQYTSALLAGTITSGWTFGAGAALQIPFAMQMAYRFNGIGVTQNVLYENQKLIANQFNSAIGKIQDSLSSTASALGKLQDVVNHNAQALNTLVKQLSSKFGAISSVLNDILSRLDPPEAEVQIDRLITGRLQSLQTYVTQQLIRAAEIRASANLAATKMSECVLGQSKRVDFCGKGYHLMSFPQSAPHGVVFLHVTYVPAQEKNFTTAPAICHDGKAHFPREGVFVSNGTHWFVTQRNFYEPQIITTDNTFVSGNCDVVIGIVNNTVYDPLQPELDSFKEELDKYFKNHTSPDVDLGDISGINASVVNIQKEIDRLNEVAKNLNESLIDLQELGKYEQYIKWPWYIWLGFIAGLIAIVMVTIMLCCMTSCCSCLKGCCSCGSCCKFDEDDSEPVLKGVKLHYT

SEQ ID NO: 291 - protein, 1256 aa, synthetic construct
QCVNLITRTQSYTNSFTRGVYYPDKVFRSSVLHSTQDLFLPFFSNVTWFHAIHVSGTNGTKRFDNPALPFNDGVYFASTEKSNIIRGWIFGTTLDSKTQSLLIVNNATNVVIKVCEFQFCNDPFLDVYQKNNKSWMESEFRVYSSANNCTFEYVSQPFLMDLEGKEGNFKNLREFVFKNIDGYFKIYSKHTPINLERDLPQGFSALEPLVDLPIGINITRFQTLLALHRSYLTPGGSSSGWTAGAAAYYVGYLQPRTFLLKYNENGTITDAVDCALDPLSETKCTLKSFTVEKGIYQTSNFRVQPTESIVRFPNITNLCPFHEVFNATTFASVYAWNRKRISNCVADYSVIYNFAPFFAFKCYGVSPTKLNDLCFTNVYADSFVIRGNEVSQIAPGQTGNIADYNYKLPDDFTGCVIAWNSNKLDSKPSGNYNYLYRLFRKSKLKPFERDISTEIYQAGNKPCNGVAGSNCYSPLQSYGFRPTYGVGHQPYRVVVLSFELLHASATVCGPKKSTNLVKNKCVNFNFNGLTGTGVLTESNKKFLPFQQFGRDIADTTDAVRDPQTLEILDITPCSFGGVSVITPGTNTSNQVAVLYQGVNCTEVPVAIHADQLTPTWRVYSTGSNVFQTRAGCLIGAEYVNNSYECDIPIGAGICASYQTQTKSHRRARSVASQSIIAYTMSLGAENSVAYSNNSIAIPTNFTISVTTEILPVSMTKTSVDCTMYICGDSTECSNLLLQYGSFCTQLKRALTGIAVEQDKNTQEVFAQVKQIYKTPPIKYFGGFNFSQILPDPSKPSKRSFIEDLLFNKVTLADAGFIKQYGDCLGDIAARDLICAQKFNGLTVLPPLLTDEMIAQYTSALLAGTITSGWTFGAGAALQIPFAMQMAYRFNGIGVTQNVLYENQKLIANQFNSAIGKIQDSLSSTASALGKLQDVVNHNAQALNTLVKQLSSKFGAISSVLNDILSRLDKVEAEVQIDRLITGRLQSLQTYVTQQLIRAAEIRASANLAATKMSECVLGQSKRVDFCGKGYHLMSFPQSAPHGVVFLHVTYVPAQEKNFTTAPAICHDGKAHFPREGVFVSNGTHWFVTQRNFYEPQIITTDNTFVSGNCDVVIGIVNNTVYDPLQPELDSFKEELDKYFKNHTSPDVDLGDISGINASVVNIQKEIDRLNEVAKNLNESLIDLQELGKYEQYIKWPWYIWLGFIAGLIAIVMVTIMLCCMTSCCSCLKGCCSCGSCCKFDEDDSEPVLKGVKLHYT

SEQ ID NO: 292 - protein, 1256 aa, synthetic construct
QCVNLITRTQSYTNSFTRGVYYPDKVFRSSVLHSTQDLFLPFFSNVTWFHAIHVSGTNGTKRFDNPALPFNDGVYFASTEKSNIIRGWIFGTTLDSKTQSLLIVNNATNVVIKVCEFQFCNDPFLDVYQKNNKSWMESEFRVYSSANNCTFEYVSQPFLMDLEGKEGNFKNLREFVFKNIDGYFKIYSKHTPINLERDLPQGFSALEPLVDLPIGINITRFQTLLALHRSYLTPGGSSSGWTAGAAAYYVGYLQPRTFLLKYNENGTITDAVDCALDPLSETKCTLKSFTVEKGIYQTSNFRVQPTESIVRFPNITNLCPFHEVFNATTFASVYAWNRKRISNCVADYSVIYNFAPFFAFKCYGVSPTKLNDLCFTNVYADSFVIRGNEVSQIAPGQTGNIADYNYKLPDDFTGCVIAWNSNKLDSKPSGNYNYLYRLFRKSKLKPFERDISTEIYQAGNKPCNGVAGSNCYSPLQSYGFRPTYGVGHQPYRVVVLSFELLHASATVCGPKKSTNLVKNKCVNFNFNGLTGTGVLTESNKKFLPFQQFGRDIADTTDAVRDPQTLEILDITPCSFGGVSVITPGTNTSNQVAVLYQGVNCTEVPVAIHADQLTPTWRVYSTGSNVFQTRAGCLIGAEYVNNSYECDIPIGAGICASYQTQTKSHQQAQSVASQSIIAYTMSLGAENSVAYSNNSIAIPTNFTISVTTEILPVSMTKTSVDCTMYICGDSTECSNLLLQYGSFCTQLKRALTGIAVEQDKNTQEVFAQVKQIYKTPPIKYFGGFNFSQILPDPSKPSKRSFIEDLLFNKVTLADAGFIKQYGDCLGDIAARDLICAQKFNGLTVLPPLLTDEMIAQYTSALLAGTITSGWTFGAGAALQIPFAMQMAYRFNGIGVTQNVLYENQKLIANQFNSAIGKIQDSLSSTASALGKLQDVVNHNAQALNTLVKQLSSKFGAISSVLNDILSRLDPPEAEVQIDRLITGRLQSLQTYVTQQLIRAAEIRASANLAATKMSECVLGQSKRVDFCGKGYHLMSFPQSAPHGVVFLHVTYVPAQEKNFTTAPAICHDGKAHFPREGVFVSNGTHWFVTQRNFYEPQIITTDNTFVSGNCDVVIGIVNNTVYDPLQPELDSFKEELDKYFKNHTSPDVDLGDISGINASVVNIQKEIDRLNEVAKNLNESLIDLQELGKYEQYIKWPWYIWLGFIAGLIAIVMVTIMLCCMTSCCSCLKGCCSCGSCCKFDEDDSEPVLKGVKLHYT

SEQ ID NO: 293 - protein, 1269 aa, Severe acute respiratory syndrome-related coronavirus
MFVFLVLLPLVSSQCVNLITRTQSYTNSFTRGVYYPDKVFRSSVLHSTHDLFLPFFSNVTWFHAIHVSGTNGTKRFDNPALPFNDGVYFASTEKSNIIRGWIFGTTLDSKTQSLLIVNNATNVVIKVCEFQFCNDPFLDVYQKNNKSWMESEFRVYSSANNCTFEYVSQPFLMDLEGKEGNFKNLREFVFKNIDGYFKIYSKHTPINLERDLPQGFSALEPLVDLPIGINITRFQTLLALHRSYLTPVDSSSGWTAGAAAYYVGYLQPRTFLLKYNENGTITDAVDCALDPLSETKCTLKSFTVEKGIYQTSNFRVQPTESIVRFPNITNLCPFHEVFNATTFASVYAWNRKRISNCVADYSVIYNFAPFFAFKCYGVSPTKLNDLCFTNVYADSFVIRGNEVSQIAPGQTGNIADYNYKLPDDFTGCVIAWNSNKLDSKPSGNYNYLYRLLRKSKLKPFERDISTEIYQAGNKPCNGVAGPNCYSPLQSYGFRPTYGVGHQPYRVVVLSFELLHAPATVCGPKKSTNLVKNKCVNFNFNGLTGTGVLTESNKKFLPFQQFGRDIADTTDAVRDPQTLEILDITPCSFGGVSVITPGTNTSNQVAVLYQGVNCTEVPVAIHADQLTPTWRVYSTGSNVFQTRAGCLIGAEYVNNSYECDIPIGAGICASYQTQTKSHRRARSVASQSIIAYTMSLGAENSVAYSNNSIAIPTNFTISVTTEILPVSMTKTSVDCTMYICGDSTECSNLLLQYGSFCTQLKRALTGIAVEQDKNTQEVFAQVKQIYKTPPIKYFGGFNFSQILPDPSKPSKRSFIEDLLFNKVTLADAGFIKQYGDCLGDIAARDLICAQKFNGLTVLPPLLTDEMIAQYTSALLAGTITSGWTFGAGAALQIPFAMQMAYRFNGIGVTQNVLYENQKLIANQFNSAIGKIQDSLSSTASALGKLQDVVNHNAQALNTLVKQLSSKFGAISSVLNDILSRLDKVEAEVQIDRLITGRLQSLQTYVTQQLIRAAEIRASANLAATKMSECVLGQSKRVDFCGKGYHLMSFPQSAPHGVVFLHVTYVPAQEKNFTTAPAICHDGKAHFPREGVFVSNGTHWFVTQRNFYEPQIITTDNTFVSGNCDVVIGIVNNTVYDPLQPELDSFKEELDKYFKNHTSPDVDLGDISGINASVVNIQKEIDRLNEVAKNLNESLIDLQELGKYEQYIKWPWYIWLGFIAGLIAIVMVTIMLCCMTSCCSCLKGCCSCGSCCKFDEDDSEPVLKGVKLHYT

SEQ ID NO: 294 - protein, 1256 aa, Severe acute respiratory syndrome-related coronavirus
QCVNLITRTQSYTNSFTRGVYYPDKVFRSSVLHSTHDLFLPFFSNVTWFHAIHVSGTNGTKRFDNPALPFNDGVYFASTEKSNIIRGWIFGTTLDSKTQSLLIVNNATNVVIKVCEFQFCNDPFLDVYQKNNKSWMESEFRVYSSANNCTFEYVSQPFLMDLEGKEGNFKNLREFVFKNIDGYFKIYSKHTPINLERDLPQGFSALEPLVDLPIGINITRFQTLLALHRSYLTPVDSSSGWTAGAAAYYVGYLQPRTFLLKYNENGTITDAVDCALDPLSETKCTLKSFTVEKGIYQTSNFRVQPTESIVRFPNITNLCPFHEVFNATTFASVYAWNRKRISNCVADYSVIYNFAPFFAFKCYGVSPTKLNDLCFTNVYADSFVIRGNEVSQIAPGQTGNIADYNYKLPDDFTGCVIAWNSNKLDSKPSGNYNYLYRLLRKSKLKPFERDISTEIYQAGNKPCNGVAGPNCYSPLQSYGFRPTYGVGHQPYRVVVLSFELLHAPATVCGPKKSTNLVKNKCVNFNFNGLTGTGVLTESNKKFLPFQQFGRDIADTTDAVRDPQTLEILDITPCSFGGVSVITPGTNTSNQVAVLYQGVNCTEVPVAIHADQLTPTWRVYSTGSNVFQTRAGCLIGAEYVNNSYECDIPIGAGICASYQTQTKSHRRARSVASQSIIAYTMSLGAENSVAYSNNSIAIPTNFTISVTTEILPVSMTKTSVDCTMYICGDSTECSNLLLQYGSFCTQLKRALTGIAVEQDKNTQEVFAQVKQIYKTPPIKYFGGFNFSQILPDPSKPSKRSFIEDLLFNKVTLADAGFIKQYGDCLGDIAARDLICAQKFNGLTVLPPLLTDEMIAQYTSALLAGTITSGWTFGAGAALQIPFAMQMAYRFNGIGVTQNVLYENQKLIANQFNSAIGKIQDSLSSTASALGKLQDVVNHNAQALNTLVKQLSSKFGAISSVLNDILSRLDKVEAEVQIDRLITGRLQSLQTYVTQQLIRAAEIRASANLAATKMSECVLGQSKRVDFCGKGYHLMSFPQSAPHGVVFLHVTYVPAQEKNFTTAPAICHDGKAHFPREGVFVSNGTHWFVTQRNFYEPQIITTDNTFVSGNCDVVIGIVNNTVYDPLQPELDSFKEELDKYFKNHTSPDVDLGDISGINASVVNIQKEIDRLNEVAKNLNESLIDLQELGKYEQYIKWPWYIWLGFIAGLIAIVMVTIMLCCMTSCCSCLKGCCSCGSCCKFDEDDSEPVLKGVKLHYT

SEQ ID NO: 295 - protein, 1269 aa, synthetic construct
MFVFLVLLPLVSSQCVNLITRTQSYTNSFTRGVYYPDKVFRSSVLHSTHDLFLPFFSNVTWFHAIHVSGTNGTKRFDNPALPFNDGVYFASTEKSNIIRGWIFGTTLDSKTQSLLIVNNATNVVIKVCEFQFCNDPFLDVYQKNNKSWMESEFRVYSSANNCTFEYVSQPFLMDLEGKEGNFKNLREFVFKNIDGYFKIYSKHTPINLERDLPQGFSALEPLVDLPIGINITRFQTLLALHRSYLTPVDSSSGWTAGAAAYYVGYLQPRTFLLKYNENGTITDAVDCALDPLSETKCTLKSFTVEKGIYQTSNFRVQPTESIVRFPNITNLCPFHEVFNATTFASVYAWNRKRISNCVADYSVIYNFAPFFAFKCYGVSPTKLNDLCFTNVYADSFVIRGNEVSQIAPGQTGNIADYNYKLPDDFTGCVIAWNSNKLDSKPSGNYNYLYRLLRKSKLKPFERDISTEIYQAGNKPCNGVAGPNCYSPLQSYGFRPTYGVGHQPYRVVVLSFELLHAPATVCGPKKSTNLVKNKCVNFNFNGLTGTGVLTESNKKFLPFQQFGRDIADTTDAVRDPQTLEILDITPCSFGGVSVITPGTNTSNQVAVLYQGVNCTEVPVAIHADQLTPTWRVYSTGSNVFQTRAGCLIGAEYVNNSYECDIPIGAGICASYQTQTKSHQQAQSVASQSIIAYTMSLGAENSVAYSNNSIAIPTNFTISVTTEILPVSMTKTSVDCTMYICGDSTECSNLLLQYGSFCTQLKRALTGIAVEQDKNTQEVFAQVKQIYKTPPIKYFGGFNFSQILPDPSKPSKRSFIEDLLFNKVTLADAGFIKQYGDCLGDIAARDLICAQKFNGLTVLPPLLTDEMIAQYTSALLAGTITSGWTFGAGAALQIPFAMQMAYRFNGIGVTQNVLYENQKLIANQFNSAIGKIQDSLSSTASALGKLQDVVNHNAQALNTLVKQLSSKFGAISSVLNDILSRLDPPEAEVQIDRLITGRLQSLQTYVTQQLIRAAEIRASANLAATKMSECVLGQSKRVDFCGKGYHLMSFPQSAPHGVVFLHVTYVPAQEKNFTTAPAICHDGKAHFPREGVFVSNGTHWFVTQRNFYEPQIITTDNTFVSGNCDVVIGIVNNTVYDPLQPELDSFKEELDKYFKNHTSPDVDLGDISGINASVVNIQKEIDRLNEVAKNLNESLIDLQELGKYEQYIKWPWYIWLGFIAGLIAIVMVTIMLCCMTSCCSCLKGCCSCGSCCKFDEDDSEPVLKGVKLHYT

SEQ ID NO: 296 - protein, 1256 aa, synthetic construct
QCVNLITRTQSYTNSFTRGVYYPDKVFRSSVLHSTHDLFLPFFSNVTWFHAIHVSGTNGTKRFDNPALPFNDGVYFASTEKSNIIRGWIFGTTLDSKTQSLLIVNNATNVVIKVCEFQFCNDPFLDVYQKNNKSWMESEFRVYSSANNCTFEYVSQPFLMDLEGKEGNFKNLREFVFKNIDGYFKIYSKHTPINLERDLPQGFSALEPLVDLPIGINITRFQTLLALHRSYLTPVDSSSGWTAGAAAYYVGYLQPRTFLLKYNENGTITDAVDCALDPLSETKCTLKSFTVEKGIYQTSNFRVQPTESIVRFPNITNLCPFHEVFNATTFASVYAWNRKRISNCVADYSVIYNFAPFFAFKCYGVSPTKLNDLCFTNVYADSFVIRGNEVSQIAPGQTGNIADYNYKLPDDFTGCVIAWNSNKLDSKPSGNYNYLYRLLRKSKLKPFERDISTEIYQAGNKPCNGVAGPNCYSPLQSYGFRPTYGVGHQPYRVVVLSFELLHAPATVCGPKKSTNLVKNKCVNFNFNGLTGTGVLTESNKKFLPFQQFGRDIADTTDAVRDPQTLEILDITPCSFGGVSVITPGTNTSNQVAVLYQGVNCTEVPVAIHADQLTPTWRVYSTGSNVFQTRAGCLIGAEYVNNSYECDIPIGAGICASYQTQTKSHQQAQSVASQSIIAYTMSLGAENSVAYSNNSIAIPTNFTISVTTEILPVSMTKTSVDCTMYICGDSTECSNLLLQYGSFCTQLKRALTGIAVEQDKNTQEVFAQVKQIYKTPPIKYFGGFNFSQILPDPSKPSKRSFIEDLLFNKVTLADAGFIKQYGDCLGDIAARDLICAQKFNGLTVLPPLLTDEMIAQYTSALLAGTITSGWTFGAGAALQIPFAMQMAYRFNGIGVTQNVLYENQKLIANQFNSAIGKIQDSLSSTASALGKLQDVVNHNAQALNTLVKQLSSKFGAISSVLNDILSRLDPPEAEVQIDRLITGRLQSLQTYVTQQLIRAAEIRASANLAATKMSECVLGQSKRVDFCGKGYHLMSFPQSAPHGVVFLHVTYVPAQEKNFTTAPAICHDGKAHFPREGVFVSNGTHWFVTQRNFYEPQIITTDNTFVSGNCDVVIGIVNNTVYDPLQPELDSFKEELDKYFKNHTSPDVDLGDISGINASVVNIQKEIDRLNEVAKNLNESLIDLQELGKYEQYIKWPWYIWLGFIAGLIAIVMVTIMLCCMTSCCSCLKGCCSCGSCCKFDEDDSEPVLKGVKLHYT

SEQ ID NO: 297 - protein, 1269 aa, synthetic construct
MFVFLVLLPLVSSQCVNLITRTQSYTNSFTRGVYYPDKVFRSSVLHSTHDLFLPFFSNVTWFHAIHVSGTNGTKRFDNPALPFNDGVYFASTEKSNIIRGWIFGTTLDSKTQSLLIVNNATNVVIKVCEFQFCNDPFLDVYQKNNKSWMESEFRVYSSANNCTFEYVSQPFLMDLEGKEGNFKNLREFVFKNIDGYFKIYSKHTPINLERDLPQGFSALEPLVDLPIGINITRFQTLLALHRSYLTPVDSSSGWTAGAAAYYVGYLQPRTFLLKYNENGTITDAVDCALDPLSETKCTLKSFTVEKGIYQTSNFRVQPTESIVRFPNITNLCPFHEVFNATTFASVYAWNRKRISNCVADYSVIYNFAPFFAFKCYGVSPTKLNDLCFTNVYADSFVIRGNEVSQIAPGQTGNIADYNYKLPDDFTGCVIAWNSNKLDSKPSGNYNYLYRLLRKSKLKPFERDISTEIYQAGNKPCNGVAGPNCYSPLQSYGFRPTYGVGHQPYRVVVLSFELLHASATVCGPKKSTNLVKNKCVNFNFNGLTGTGVLTESNKKFLPFQQFGRDIADTTDAVRDPQTLEILDITPCSFGGVSVITPGTNTSNQVAVLYQGVNCTEVPVAIHADQLTPTWRVYSTGSNVFQTRAGCLIGAEYVNNSYECDIPIGAGICASYQTQTKSHRRARSVASQSIIAYTMSLGAENSVAYSNNSIAIPTNFTISVTTEILPVSMTKTSVDCTMYICGDSTECSNLLLQYGSFCTQLKRALTGIAVEQDKNTQEVFAQVKQIYKTPPIKYFGGFNFSQILPDPSKPSKRSFIEDLLFNKVTLADAGFIKQYGDCLGDIAARDLICAQKFNGLTVLPPLLTDEMIAQYTSALLAGTITSGWTFGAGAALQIPFAMQMAYRFNGIGVTQNVLYENQKLIANQFNSAIGKIQDSLSSTASALGKLQDVVNHNAQALNTLVKQLSSKFGAISSVLNDILSRLDKVEAEVQIDRLITGRLQSLQTYVTQQLIRAAEIRASANLAATKMSECVLGQSKRVDFCGKGYHLMSFPQSAPHGVVFLHVTYVPAQEKNFTTAPAICHDGKAHFPREGVFVSNGTHWFVTQRNFYEPQIITTDNTFVSGNCDVVIGIVNNTVYDPLQPELDSFKEELDKYFKNHTSPDVDLGDISGINASVVNIQKEIDRLNEVAKNLNESLIDLQELGKYEQYIKWPWYIWLGFIAGLIAIVMVTIMLCCMTSCCSCLKGCCSCGSCCKFDEDDSEPVLKGVKLHYT

SEQ ID NO: 298 - protein, 1256 aa, synthetic construct
QCVNLITRTQSYTNSFTRGVYYPDKVFRSSVLHSTHDLFLPFFSNVTWFHAIHVSGTNGTKRFDNPALPFNDGVYFASTEKSNIIRGWIFGTTLDSKTQSLLIVNNATNVVIKVCEFQFCNDPFLDVYQKNNKSWMESEFRVYSSANNCTFEYVSQPFLMDLEGKEGNFKNLREFVFKNIDGYFKIYSKHTPINLERDLPQGFSALEPLVDLPIGINITRFQTLLALHRSYLTPVDSSSGWTAGAAAYYVGYLQPRTFLLKYNENGTITDAVDCALDPLSETKCTLKSFTVEKGIYQTSNFRVQPTESIVRFPNITNLCPFHEVFNATTFASVYAWNRKRISNCVADYSVIYNFAPFFAFKCYGVSPTKLNDLCFTNVYADSFVIRGNEVSQIAPGQTGNIADYNYKLPDDFTGCVIAWNSNKLDSKPSGNYNYLYRLLRKSKLKPFERDISTEIYQAGNKPCNGVAGPNCYSPLQSYGFRPTYGVGHQPYRVVVLSFELLHASATVCGPKKSTNLVKNKCVNFNFNGLTGTGVLTESNKKFLPFQQFGRDIADTTDAVRDPQTLEILDITPCSFGGVSVITPGTNTSNQVAVLYQGVNCTEVPVAIHADQLTPTWRVYSTGSNVFQTRAGCLIGAEYVNNSYECDIPIGAGICASYQTQTKSHRRARSVASQSIIAYTMSLGAENSVAYSNNSIAIPTNFTISVTTEILPVSMTKTSVDCTMYICGDSTECSNLLLQYGSFCTQLKRALTGIAVEQDKNTQEVFAQVKQIYKTPPIKYFGGFNFSQILPDPSKPSKRSFIEDLLFNKVTLADAGFIKQYGDCLGDIAARDLICAQKFNGLTVLPPLLTDEMIAQYTSALLAGTITSGWTFGAGAALQIPFAMQMAYRFNGIGVTQNVLYENQKLIANQFNSAIGKIQDSLSSTASALGKLQDVVNHNAQALNTLVKQLSSKFGAISSVLNDILSRLDKVEAEVQIDRLITGRLQSLQTYVTQQLIRAAEIRASANLAATKMSECVLGQSKRVDFCGKGYHLMSFPQSAPHGVVFLHVTYVPAQEKNFTTAPAICHDGKAHFPREGVFVSNGTHWFVTQRNFYEPQIITTDNTFVSGNCDVVIGIVNNTVYDPLQPELDSFKEELDKYFKNHTSPDVDLGDISGINASVVNIQKEIDRLNEVAKNLNESLIDLQELGKYEQYIKWPWYIWLGFIAGLIAIVMVTIMLCCMTSCCSCLKGCCSCGSCCKFDEDDSEPVLKGVKLHYT

SEQ ID NO: 299 - protein, 1269 aa, synthetic construct
MFVFLVLLPLVSSQCVNLITRTQSYTNSFTRGVYYPDKVFRSSVLHSTHDLFLPFFSNVTWFHAIHVSGTNGTKRFDNPALPFNDGVYFASTEKSNIIRGWIFGTTLDSKTQSLLIVNNATNVVIKVCEFQFCNDPFLDVYQKNNKSWMESEFRVYSSANNCTFEYVSQPFLMDLEGKEGNFKNLREFVFKNIDGYFKIYSKHTPINLERDLPQGFSALEPLVDLPIGINITRFQTLLALHRSYLTPVDSSSGWTAGAAAYYVGYLQPRTFLLKYNENGTITDAVDCALDPLSETKCTLKSFTVEKGIYQTSNFRVQPTESIVRFPNITNLCPFHEVFNATTFASVYAWNRKRISNCVADYSVIYNFAPFFAFKCYGVSPTKLNDLCFTNVYADSFVIRGNEVSQIAPGQTGNIADYNYKLPDDFTGCVIAWNSNKLDSKPSGNYNYLYRLLRKSKLKPFERDISTEIYQAGNKPCNGVAGPNCYSPLQSYGFRPTYGVGHQPYRVVVLSFELLHASATVCGPKKSTNLVKNKCVNFNFNGLTGTGVLTESNKKFLPFQQFGRDIADTTDAVRDPQTLEILDITPCSFGGVSVITPGTNTSNQVAVLYQGVNCTEVPVAIHADQLTPTWRVYSTGSNVFQTRAGCLIGAEYVNNSYECDIPIGAGICASYQTQTKSHQQAQSVASQSIIAYTMSLGAENSVAYSNNSIAIPTNFTISVTTEILPVSMTKTSVDCTMYICGDSTECSNLLLQYGSFCTQLKRALTGIAVEQDKNTQEVFAQVKQIYKTPPIKYFGGFNFSQILPDPSKPSKRSFIEDLLFNKVTLADAGFIKQYGDCLGDIAARDLICAQKFNGLTVLPPLLTDEMIAQYTSALLAGTITSGWTFGAGAALQIPFAMQMAYRFNGIGVTQNVLYENQKLIANQFNSAIGKIQDSLSSTASALGKLQDVVNHNAQALNTLVKQLSSKFGAISSVLNDILSRLDPPEAEVQIDRLITGRLQSLQTYVTQQLIRAAEIRASANLAATKMSECVLGQSKRVDFCGKGYHLMSFPQSAPHGVVFLHVTYVPAQEKNFTTAPAICHDGKAHFPREGVFVSNGTHWFVTQRNFYEPQIITTDNTFVSGNCDVVIGIVNNTVYDPLQPELDSFKEELDKYFKNHTSPDVDLGDISGINASVVNIQKEIDRLNEVAKNLNESLIDLQELGKYEQYIKWPWYIWLGFIAGLIAIVMVTIMLCCMTSCCSCLKGCCSCGSCCKFDEDDSEPVLKGVKLHYT

SEQ ID NO: 300 - protein, 1256 aa, synthetic construct
QCVNLITRTQSYTNSFTRGVYYPDKVFRSSVLHSTHDLFLPFFSNVTWFHAIHVSGTNGTKRFDNPALPFNDGVYFASTEKSNIIRGWIFGTTLDSKTQSLLIVNNATNVVIKVCEFQFCNDPFLDVYQKNNKSWMESEFRVYSSANNCTFEYVSQPFLMDLEGKEGNFKNLREFVFKNIDGYFKIYSKHTPINLERDLPQGFSALEPLVDLPIGINITRFQTLLALHRSYLTPVDSSSGWTAGAAAYYVGYLQPRTFLLKYNENGTITDAVDCALDPLSETKCTLKSFTVEKGIYQTSNFRVQPTESIVRFPNITNLCPFHEVFNATTFASVYAWNRKRISNCVADYSVIYNFAPFFAFKCYGVSPTKLNDLCFTNVYADSFVIRGNEVSQIAPGQTGNIADYNYKLPDDFTGCVIAWNSNKLDSKPSGNYNYLYRLLRKSKLKPFERDISTEIYQAGNKPCNGVAGPNCYSPLQSYGFRPTYGVGHQPYRVVVLSFELLHASATVCGPKKSTNLVKNKCVNFNFNGLTGTGVLTESNKKFLPFQQFGRDIADTTDAVRDPQTLEILDITPCSFGGVSVITPGTNTSNQVAVLYQGVNCTEVPVAIHADQLTPTWRVYSTGSNVFQTRAGCLIGAEYVNNSYECDIPIGAGICASYQTQTKSHQQAQSVASQSIIAYTMSLGAENSVAYSNNSIAIPTNFTISVTTEILPVSMTKTSVDCTMYICGDSTECSNLLLQYGSFCTQLKRALTGIAVEQDKNTQEVFAQVKQIYKTPPIKYFGGFNFSQILPDPSKPSKRSFIEDLLFNKVTLADAGFIKQYGDCLGDIAARDLICAQKFNGLTVLPPLLTDEMIAQYTSALLAGTITSGWTFGAGAALQIPFAMQMAYRFNGIGVTQNVLYENQKLIANQFNSAIGKIQDSLSSTASALGKLQDVVNHNAQALNTLVKQLSSKFGAISSVLNDILSRLDPPEAEVQIDRLITGRLQSLQTYVTQQLIRAAEIRASANLAATKMSECVLGQSKRVDFCGKGYHLMSFPQSAPHGVVFLHVTYVPAQEKNFTTAPAICHDGKAHFPREGVFVSNGTHWFVTQRNFYEPQIITTDNTFVSGNCDVVIGIVNNTVYDPLQPELDSFKEELDKYFKNHTSPDVDLGDISGINASVVNIQKEIDRLNEVAKNLNESLIDLQELGKYEQYIKWPWYIWLGFIAGLIAIVMVTIMLCCMTSCCSCLKGCCSCGSCCKFDEDDSEPVLKGVKLHYT

SEQ ID NO: 301 - protein, 1269 aa, synthetic construct
MFVFLVLLPLVSSQCVNLITRTQSYTNSFTRGVYYPDKVFRSSVLHSTHDLFLPFFSNVTWFHAIHVSGTNGTKRFDNPALPFNDGVYFASTEKSNIIRGWIFGTTLDSKTQSLLIVNNATNVVIKVCEFQFCNDPFLDVYQKNNKSWMESEFRVYSSANNCTFEYVSQPFLMDLEGKEGNFKNLREFVFKNIDGYFKIYSKHTPINLERDLPQGFSALEPLVDLPIGINITRFQTLLALHRSYLTPVDSSSGWTAGAAAYYVGYLQPRTFLLKYNENGTITDAVDCALDPLSETKCTLKSFTVEKGIYQTSNFRVQPTESIVRFPNITNLCPFHEVFNATTFASVYAWNRKRISNCVADYSVIYNFAPFFAFKCYGVSPTKLNDLCFTNVYADSFVIRGNEVSQIAPGQTGNIADYNYKLPDDFTGCVIAWNSNKLDSTPSGNYNYLYRLLRKSKLKPFERDISTEIYQAGNKPCNGVAGPNCYSPLQSYGFRPTYGVGHQPYRVVVLSFELLHAPATVCGPKKSTNLVKNKCVNFNFNGLTGTGVLTESNKKFLPFQQFGRDIADTTDAVRDPQTLEILDITPCSFGGVSVITPGTNTSNQVAVLYQGVNCTEVPVAIHADQLTPTWRVYSTGSNVFQTRAGCLIGAEYVNNSYECDIPIGAGICASYQTQTKSHRRARSVASQSIIAYTMSLGAENSVAYSNNSIAIPTNFTISVTTEILPVSMTKTSVDCTMYICGDSTECSNLLLQYGSFCTQLKRALTGIAVEQDKNTQEVFAQVKQIYKTPPIKYFGGFNFSQILPDPSKPSKRSFIEDLLFNKVTLADAGFIKQYGDCLGDIAARDLICAQKFNGLTVLPPLLTDEMIAQYTSALLAGTITSGWTFGAGAALQIPFAMQMAYRFNGIGVTQNVLYENQKLIANQFNSAIGKIQDSLSSTASALGKLQDVVNHNAQALNTLVKQLSSKFGAISSVLNDILSRLDKVEAEVQIDRLITGRLQSLQTYVTQQLIRAAEIRASANLAATKMSECVLGQSKRVDFCGKGYHLMSFPQSAPHGVVFLHVTYVPAQEKNFTTAPAICHDGKAHFPREGVFVSNGTHWFVTQRNFYEPQIITTDNTFVSGNCDVVIGIVNNTVYDPLQPELDSFKEELDKYFKNHTSPDVDLGDISGINASVVNIQKEIDRLNEVAKNLNESLIDLQELGKYEQYIKWPWYIWLGFIAGLIAIVMVTIMLCCMTSCCSCLKGCCSCGSCCKFDEDDSEPVLKGVKLHYT

SEQ ID NO: 302 - protein, 1256 aa, synthetic construct
QCVNLITRTQSYTNSFTRGVYYPDKVFRSSVLHSTHDLFLPFFSNVTWFHAIHVSGTNGTKRFDNPALPFNDGVYFASTEKSNIIRGWIFGTTLDSKTQSLLIVNNATNVVIKVCEFQFCNDPFLDVYQKNNKSWMESEFRVYSSANNCTFEYVSQPFLMDLEGKEGNFKNLREFVFKNIDGYFKIYSKHTPINLERDLPQGFSALEPLVDLPIGINITRFQTLLALHRSYLTPVDSSSGWTAGAAAYYVGYLQPRTFLLKYNENGTITDAVDCALDPLSETKCTLKSFTVEKGIYQTSNFRVQPTESIVRFPNITNLCPFHEVFNATTFASVYAWNRKRISNCVADYSVIYNFAPFFAFKCYGVSPTKLNDLCFTNVYADSFVIRGNEVSQIAPGQTGNIADYNYKLPDDFTGCVIAWNSNKLDSTPSGNYNYLYRLLRKSKLKPFERDISTEIYQAGNKPCNGVAGPNCYSPLQSYGFRPTYGVGHQPYRVVVLSFELLHAPATVCGPKKSTNLVKNKCVNFNFNGLTGTGVLTESNKKFLPFQQFGRDIADTTDAVRDPQTLEILDITPCSFGGVSVITPGTNTSNQVAVLYQGVNCTEVPVAIHADQLTPTWRVYSTGSNVFQTRAGCLIGAEYVNNSYECDIPIGAGICASYQTQTKSHRRARSVASQSIIAYTMSLGAENSVAYSNNSIAIPTNFTISVTTEILPVSMTKTSVDCTMYICGDSTECSNLLLQYGSFCTQLKRALTGIAVEQDKNTQEVFAQVKQIYKTPPIKYFGGFNFSQILPDPSKPSKRSFIEDLLFNKVTLADAGFIKQYGDCLGDIAARDLICAQKFNGLTVLPPLLTDEMIAQYTSALLAGTITSGWTFGAGAALQIPFAMQMAYRFNGIGVTQNVLYENQKLIANQFNSAIGKIQDSLSSTASALGKLQDVVNHNAQALNTLVKQLSSKFGAISSVLNDILSRLDKVEAEVQIDRLITGRLQSLQTYVTQQLIRAAEIRASANLAATKMSECVLGQSKRVDFCGKGYHLMSFPQSAPHGVVFLHVTYVPAQEKNFTTAPAICHDGKAHFPREGVFVSNGTHWFVTQRNFYEPQIITTDNTFVSGNCDVVIGIVNNTVYDPLQPELDSFKEELDKYFKNHTSPDVDLGDISGINASVVNIQKEIDRLNEVAKNLNESLIDLQELGKYEQYIKWPWYIWLGFIAGLIAIVMVTIMLCCMTSCCSCLKGCCSCGSCCKFDEDDSEPVLKGVKLHYT

SEQ ID NO: 303 - protein, 1269 aa, synthetic construct
MFVFLVLLPLVSSQCVNLITRTQSYTNSFTRGVYYPDKVFRSSVLHSTHDLFLPFFSNVTWFHAIHVSGTNGTKRFDNPALPFNDGVYFASTEKSNIIRGWIFGTTLDSKTQSLLIVNNATNVVIKVCEFQFCNDPFLDVYQKNNKSWMESEFRVYSSANNCTFEYVSQPFLMDLEGKEGNFKNLREFVFKNIDGYFKIYSKHTPINLERDLPQGFSALEPLVDLPIGINITRFQTLLALHRSYLTPVDSSSGWTAGAAAYYVGYLQPRTFLLKYNENGTITDAVDCALDPLSETKCTLKSFTVEKGIYQTSNFRVQPTESIVRFPNITNLCPFHEVFNATTFASVYAWNRKRISNCVADYSVIYNFAPFFAFKCYGVSPTKLNDLCFTNVYADSFVIRGNEVSQIAPGQTGNIADYNYKLPDDFTGCVIAWNSNKLDSTPSGNYNYLYRLLRKSKLKPFERDISTEIYQAGNKPCNGVAGPNCYSPLQSYGFRPTYGVGHQPYRVVVLSFELLHAPATVCGPKKSTNLVKNKCVNFNFNGLTGTGVLTESNKKFLPFQQFGRDIADTTDAVRDPQTLEILDITPCSFGGVSVITPGTNTSNQVAVLYQGVNCTEVPVAIHADQLTPTWRVYSTGSNVFQTRAGCLIGAEYVNNSYECDIPIGAGICASYQTQTKSHQQAQSVASQSIIAYTMSLGAENSVAYSNNSIAIPTNFTISVTTEILPVSMTKTSVDCTMYICGDSTECSNLLLQYGSFCTQLKRALTGIAVEQDKNTQEVFAQVKQIYKTPPIKYFGGFNFSQILPDPSKPSKRSFIEDLLFNKVTLADAGFIKQYGDCLGDIAARDLICAQKFNGLTVLPPLLTDEMIAQYTSALLAGTITSGWTFGAGAALQIPFAMQMAYRFNGIGVTQNVLYENQKLIANQFNSAIGKIQDSLSSTASALGKLQDVVNHNAQALNTLVKQLSSKFGAISSVLNDILSRLDPPEAEVQIDRLITGRLQSLQTYVTQQLIRAAEIRASANLAATKMSECVLGQSKRVDFCGKGYHLMSFPQSAPHGVVFLHVTYVPAQEKNFTTAPAICHDGKAHFPREGVFVSNGTHWFVTQRNFYEPQIITTDNTFVSGNCDVVIGIVNNTVYDPLQPELDSFKEELDKYFKNHTSPDVDLGDISGINASVVNIQKEIDRLNEVAKNLNESLIDLQELGKYEQYIKWPWYIWLGFIAGLIAIVMVTIMLCCMTSCCSCLKGCCSCGSCCKFDEDDSEPVLKGVKLHYT

SEQ ID NO: 304 - protein, 1256 aa, synthetic construct
QCVNLITRTQSYTNSFTRGVYYPDKVFRSSVLHSTHDLFLPFFSNVTWFHAIHVSGTNGTKRFDNPALPFNDGVYFASTEKSNIIRGWIFGTTLDSKTQSLLIVNNATNVVIKVCEFQFCNDPFLDVYQKNNKSWMESEFRVYSSANNCTFEYVSQPFLMDLEGKEGNFKNLREFVFKNIDGYFKIYSKHTPINLERDLPQGFSALEPLVDLPIGINITRFQTLLALHRSYLTPVDSSSGWTAGAAAYYVGYLQPRTFLLKYNENGTITDAVDCALDPLSETKCTLKSFTVEKGIYQTSNFRVQPTESIVRFPNITNLCPFHEVFNATTFASVYAWNRKRISNCVADYSVIYNFAPFFAFKCYGVSPTKLNDLCFTNVYADSFVIRGNEVSQIAPGQTGNIADYNYKLPDDFTGCVIAWNSNKLDSTPSGNYNYLYRLLRKSKLKPFERDISTEIYQAGNKPCNGVAGPNCYSPLQSYGFRPTYGVGHQPYRVVVLSFELLHAPATVCGPKKSTNLVKNKCVNFNFNGLTGTGVLTESNKKFLPFQQFGRDIADTTDAVRDPQTLEILDITPCSFGGVSVITPGTNTSNQVAVLYQGVNCTEVPVAIHADQLTPTWRVYSTGSNVFQTRAGCLIGAEYVNNSYECDIPIGAGICASYQTQTKSHQQAQSVASQSIIAYTMSLGAENSVAYSNNSIAIPTNFTISVTTEILPVSMTKTSVDCTMYICGDSTECSNLLLQYGSFCTQLKRALTGIAVEQDKNTQEVFAQVKQIYKTPPIKYFGGFNFSQILPDPSKPSKRSFIEDLLFNKVTLADAGFIKQYGDCLGDIAARDLICAQKFNGLTVLPPLLTDEMIAQYTSALLAGTITSGWTFGAGAALQIPFAMQMAYRFNGIGVTQNVLYENQKLIANQFNSAIGKIQDSLSSTASALGKLQDVVNHNAQALNTLVKQLSSKFGAISSVLNDILSRLDPPEAEVQIDRLITGRLQSLQTYVTQQLIRAAEIRASANLAATKMSECVLGQSKRVDFCGKGYHLMSFPQSAPHGVVFLHVTYVPAQEKNFTTAPAICHDGKAHFPREGVFVSNGTHWFVTQRNFYEPQIITTDNTFVSGNCDVVIGIVNNTVYDPLQPELDSFKEELDKYFKNHTSPDVDLGDISGINASVVNIQKEIDRLNEVAKNLNESLIDLQELGKYEQYIKWPWYIWLGFIAGLIAIVMVTIMLCCMTSCCSCLKGCCSCGSCCKFDEDDSEPVLKGVKLHYT

SEQ ID NO: 305 - protein, 1269 aa, synthetic construct
MFVFLVLLPLVSSQCVNLITRTQSYTNSFTRGVYYPDKVFRSSVLHSTHDLFLPFFSNVTWFHAIHVSGTNGTKRFDNPALPFNDGVYFASTEKSNIIRGWIFGTTLDSKTQSLLIVNNATNVVIKVCEFQFCNDPFLDVYQKNNKSWMESEFRVYSSANNCTFEYVSQPFLMDLEGKEGNFKNLREFVFKNIDGYFKIYSKHTPINLERDLPQGFSALEPLVDLPIGINITRFQTLLALHRSYLTPVDSSSGWTAGAAAYYVGYLQPRTFLLKYNENGTITDAVDCALDPLSETKCTLKSFTVEKGIYQTSNFRVQPTESIVRFPNITNLCPFHEVFNATTFASVYAWNRKRISNCVADYSVIYNFAPFFAFKCYGVSPTKLNDLCFTNVYADSFVIRGNEVSQIAPGQTGNIADYNYKLPDDFTGCVIAWNSNKLDSKPSGNYNYLYRLLRKSKLKPFERDISTEIYQAGNKPCNGVAGSNCYSPLQSYGFRPTYGVGHQPYRVVVLSFELLHAPATVCGPKKSTNLVKNKCVNFNFNGLTGTGVLTESNKKFLPFQQFGRDIADTTDAVRDPQTLEILDITPCSFGGVSVITPGTNTSNQVAVLYQGVNCTEVPVAIHADQLTPTWRVYSTGSNVFQTRAGCLIGAEYVNNSYECDIPIGAGICASYQTQTKSHRRARSVASQSIIAYTMSLGAENSVAYSNNSIAIPTNFTISVTTEILPVSMTKTSVDCTMYICGDSTECSNLLLQYGSFCTQLKRALTGIAVEQDKNTQEVFAQVKQIYKTPPIKYFGGFNFSQILPDPSKPSKRSFIEDLLFNKVTLADAGFIKQYGDCLGDIAARDLICAQKFNGLTVLPPLLTDEMIAQYTSALLAGTITSGWTFGAGAALQIPFAMQMAYRFNGIGVTQNVLYENQKLIANQFNSAIGKIQDSLSSTASALGKLQDVVNHNAQALNTLVKQLSSKFGAISSVLNDILSRLDKVEAEVQIDRLITGRLQSLQTYVTQQLIRAAEIRASANLAATKMSECVLGQSKRVDFCGKGYHLMSFPQSAPHGVVFLHVTYVPAQEKNFTTAPAICHDGKAHFPREGVFVSNGTHWFVTQRNFYEPQIITTDNTFVSGNCDVVIGIVNNTVYDPLQPELDSFKEELDKYFKNHTSPDVDLGDISGINASVVNIQKEIDRLNEVAKNLNESLIDLQELGKYEQYIKWPWYIWLGFIAGLIAIVMVTIMLCCMTSCCSCLKGCCSCGSCCKFDEDDSEPVLKGVKLHYT

SEQ ID NO: 306 - protein, 1256 aa, synthetic construct
QCVNLITRTQSYTNSFTRGVYYPDKVFRSSVLHSTHDLFLPFFSNVTWFHAIHVSGTNGTKRFDNPALPFNDGVYFASTEKSNIIRGWIFGTTLDSKTQSLLIVNNATNVVIKVCEFQFCNDPFLDVYQKNNKSWMESEFRVYSSANNCTFEYVSQPFLMDLEGKEGNFKNLREFVFKNIDGYFKIYSKHTPINLERDLPQGFSALEPLVDLPIGINITRFQTLLALHRSYLTPVDSSSGWTAGAAAYYVGYLQPRTFLLKYNENGTITDAVDCALDPLSETKCTLKSFTVEKGIYQTSNFRVQPTESIVRFPNITNLCPFHEVFNATTFASVYAWNRKRISNCVADYSVIYNFAPFFAFKCYGVSPTKLNDLCFTNVYADSFVIRGNEVSQIAPGQTGNIADYNYKLPDDFTGCVIAWNSNKLDSKPSGNYNYLYRLLRKSKLKPFERDISTEIYQAGNKPCNGVAGSNCYSPLQSYGFRPTYGVGHQPYRVVVLSFELLHAPATVCGPKKSTNLVKNKCVNFNFNGLTGTGVLTESNKKFLPFQQFGRDIADTTDAVRDPQTLEILDITPCSFGGVSVITPGTNTSNQVAVLYQGVNCTEVPVAIHADQLTPTWRVYSTGSNVFQTRAGCLIGAEYVNNSYECDIPIGAGICASYQTQTKSHRRARSVASQSIIAYTMSLGAENSVAYSNNSIAIPTNFTISVTTEILPVSMTKTSVDCTMYICGDSTECSNLLLQYGSFCTQLKRALTGIAVEQDKNTQEVFAQVKQIYKTPPIKYFGGFNFSQILPDPSKPSKRSFIEDLLFNKVTLADAGFIKQYGDCLGDIAARDLICAQKFNGLTVLPPLLTDEMIAQYTSALLAGTITSGWTFGAGAALQIPFAMQMAYRFNGIGVTQNVLYENQKLIANQFNSAIGKIQDSLSSTASALGKLQDVVNHNAQALNTLVKQLSSKFGAISSVLNDILSRLDKVEAEVQIDRLITGRLQSLQTYVTQQLIRAAEIRASANLAATKMSECVLGQSKRVDFCGKGYHLMSFPQSAPHGVVFLHVTYVPAQEKNFTTAPAICHDGKAHFPREGVFVSNGTHWFVTQRNFYEPQIITTDNTFVSGNCDVVIGIVNNTVYDPLQPELDSFKEELDKYFKNHTSPDVDLGDISGINASVVNIQKEIDRLNEVAKNLNESLIDLQELGKYEQYIKWPWYIWLGFIAGLIAIVMVTIMLCCMTSCCSCLKGCCSCGSCCKFDEDDSEPVLKGVKLHYT

SEQ ID NO: 307 - protein, 1269 aa, synthetic construct
MFVFLVLLPLVSSQCVNLITRTQSYTNSFTRGVYYPDKVFRSSVLHSTHDLFLPFFSNVTWFHAIHVSGTNGTKRFDNPALPFNDGVYFASTEKSNIIRGWIFGTTLDSKTQSLLIVNNATNVVIKVCEFQFCNDPFLDVYQKNNKSWMESEFRVYSSANNCTFEYVSQPFLMDLEGKEGNFKNLREFVFKNIDGYFKIYSKHTPINLERDLPQGFSALEPLVDLPIGINITRFQTLLALHRSYLTPVDSSSGWTAGAAAYYVGYLQPRTFLLKYNENGTITDAVDCALDPLSETKCTLKSFTVEKGIYQTSNFRVQPTESIVRFPNITNLCPFHEVFNATTFASVYAWNRKRISNCVADYSVIYNFAPFFAFKCYGVSPTKLNDLCFTNVYADSFVIRGNEVSQIAPGQTGNIADYNYKLPDDFTGCVIAWNSNKLDSKPSGNYNYLYRLLRKSKLKPFERDISTEIYQAGNKPCNGVAGSNCYSPLQSYGFRPTYGVGHQPYRVVVLSFELLHAPATVCGPKKSTNLVKNKCVNFNFNGLTGTGVLTESNKKFLPFQQFGRDIADTTDAVRDPQTLEILDITPCSFGGVSVITPGTNTSNQVAVLYQGVNCTEVPVAIHADQLTPTWRVYSTGSNVFQTRAGCLIGAEYVNNSYECDIPIGAGICASYQTQTKSHQQAQSVASQSIIAYTMSLGAENSVAYSNNSIAIPTNFTISVTTEILPVSMTKTSVDCTMYICGDSTECSNLLLQYGSFCTQLKRALTGIAVEQDKNTQEVFAQVKQIYKTPPIKYFGGFNFSQILPDPSKPSKRSFIEDLLFNKVTLADAGFIKQYGDCLGDIAARDLICAQKFNGLTVLPPLLTDEMIAQYTSALLAGTITSGWTFGAGAALQIPFAMQMAYRFNGIGVTQNVLYENQKLIANQFNSAIGKIQDSLSSTASALGKLQDVVNHNAQALNTLVKQLSSKFGAISSVLNDILSRLDPPEAEVQIDRLITGRLQSLQTYVTQQLIRAAEIRASANLAATKMSECVLGQSKRVDFCGKGYHLMSFPQSAPHGVVFLHVTYVPAQEKNFTTAPAICHDGKAHFPREGVFVSNGTHWFVTQRNFYEPQIITTDNTFVSGNCDVVIGIVNNTVYDPLQPELDSFKEELDKYFKNHTSPDVDLGDISGINASVVNIQKEIDRLNEVAKNLNESLIDLQELGKYEQYIKWPWYIWLGFIAGLIAIVMVTIMLCCMTSCCSCLKGCCSCGSCCKFDEDDSEPVLKGVKLHYT

SEQ ID NO: 308 - protein, 1256 aa, synthetic construct
QCVNLITRTQSYTNSFTRGVYYPDKVFRSSVLHSTHDLFLPFFSNVTWFHAIHVSGTNGTKRFDNPALPFNDGVYFASTEKSNIIRGWIFGTTLDSKTQSLLIVNNATNVVIKVCEFQFCNDPFLDVYQKNNKSWMESEFRVYSSANNCTFEYVSQPFLMDLEGKEGNFKNLREFVFKNIDGYFKIYSKHTPINLERDLPQGFSALEPLVDLPIGINITRFQTLLALHRSYLTPVDSSSGWTAGAAAYYVGYLQPRTFLLKYNENGTITDAVDCALDPLSETKCTLKSFTVEKGIYQTSNFRVQPTESIVRFPNITNLCPFHEVFNATTFASVYAWNRKRISNCVADYSVIYNFAPFFAFKCYGVSPTKLNDLCFTNVYADSFVIRGNEVSQIAPGQTGNIADYNYKLPDDFTGCVIAWNSNKLDSKPSGNYNYLYRLLRKSKLKPFERDISTEIYQAGNKPCNGVAGSNCYSPLQSYGFRPTYGVGHQPYRVVVLSFELLHAPATVCGPKKSTNLVKNKCVNFNFNGLTGTGVLTESNKKFLPFQQFGRDIADTTDAVRDPQTLEILDITPCSFGGVSVITPGTNTSNQVAVLYQGVNCTEVPVAIHADQLTPTWRVYSTGSNVFQTRAGCLIGAEYVNNSYECDIPIGAGICASYQTQTKSHQQAQSVASQSIIAYTMSLGAENSVAYSNNSIAIPTNFTISVTTEILPVSMTKTSVDCTMYICGDSTECSNLLLQYGSFCTQLKRALTGIAVEQDKNTQEVFAQVKQIYKTPPIKYFGGFNFSQILPDPSKPSKRSFIEDLLFNKVTLADAGFIKQYGDCLGDIAARDLICAQKFNGLTVLPPLLTDEMIAQYTSALLAGTITSGWTFGAGAALQIPFAMQMAYRFNGIGVTQNVLYENQKLIANQFNSAIGKIQDSLSSTASALGKLQDVVNHNAQALNTLVKQLSSKFGAISSVLNDILSRLDPPEAEVQIDRLITGRLQSLQTYVTQQLIRAAEIRASANLAATKMSECVLGQSKRVDFCGKGYHLMSFPQSAPHGVVFLHVTYVPAQEKNFTTAPAICHDGKAHFPREGVFVSNGTHWFVTQRNFYEPQIITTDNTFVSGNCDVVIGIVNNTVYDPLQPELDSFKEELDKYFKNHTSPDVDLGDISGINASVVNIQKEIDRLNEVAKNLNESLIDLQELGKYEQYIKWPWYIWLGFIAGLIAIVMVTIMLCCMTSCCSCLKGCCSCGSCCKFDEDDSEPVLKGVKLHYT

SEQ ID NO: 309 - protein, 1269 aa, Severe acute respiratory syndrome-related coronavirus
MFVFLVLLPLVSSQCVNLITRTQSYTNSFTRGVYYPDKVFRSSVLHSTQDLFLPFFSNVTWFHAIHVSGTNGTKRFDNPALPFNDGVYFASTEKSNIIRGWIFGTTLDSKTQSLLIVNNATNVVIKVCEFQFCNDPFLDVYQKNNKSWMESEFRVYSSANNCTFEYVSQPFLMDLVGKEGNFKNLREFVFKNIDGYFKIYSKHTPINLERDLPQGFSALEPLVDLPIGINITRFQTLLALHRSYLTPVDSSSGWTAGAAAYYVGYLQPRTFLLKYNENGTITDAVDCALDPLSETKCTLKSFTVEKGIYQTSNFRVQPTESIVRFPNITNLCPFHEVFNATTFASVYAWNRKRISNCVADYSVIYNFAPFFAFKCYGVSPTKLNDLCFTNVYADSFVIRGNEVSQIAPGQTGNIADYNYKLPDDFTGCVIAWNSNKLDSKPSGNYNYLYRLLRKSKLKPFERDISTEIYQAGNRPCNGVAGPNCYSPLQSYGFRPTYGVGHQPYRVVVLSFELLHAPATVCGPKKSTNLVKNKCVNFNFNGLTGTGVLTESNKKFLPFQQFGRDIADTTDAVRDPQTLEILDITPCSFGGVSVITPGTNTSNQVAVLYQGVNCTEVPVAIHADQLTPTWRVYSTGSNVFQTRAGCLIGAEYVNNSYECDIPIGAGICASYQTQTKSHRRARSVASQSIIAYTMSLGAENSVAYSNNSIAIPTNFTISVTTEILPVSMTKTSVDCTMYICGDSTECSNLLLQYGSFCTQLKRALTGIAVEQDKNTQEVFAQVKQIYKTPPIKYFGGFNFSQILPDPSKPSKRSFIEDLLFNKVTLADAGFIKQYGDCLGDIAARDLICAQKFNGLTVLPPLLTDEMIAQYTSALLAGTITSGWTFGAGAALQIPFAMQMAYRFNGIGVTQNVLYENQKLIANQFNSAIGKIQDSLSSTASALGKLQDVVNHNAQALNTLVKQLSSKFGAISSVLNDILSRLDKVEAEVQIDRLITGRLQSLQTYVTQQLIRAAEIRASANLAATKMSECVLGQSKRVDFCGKGYHLMSFPQSAPHGVVFLHVTYVPAQEKNFTTAPAICHDGKAHFPREGVFVSNGTHWFVTQRNFYEPQIITTDNTFVSGNCDVVIGIVNNTVYDPLQPELDSFKEELDKYFKNHTSPDVDLGDISGINASVVNIQKEIDRLNEVAKNLNESLIDLQELGKYEQYIKWPWYIWLGFIAGLIAIVMVTIMLCCMTSCCSCLKGCCSCGSCCKFDEDDSEPVLKGVKLHYT

SEQ ID NO: 310 - protein, 1256 aa, Severe acute respiratory syndrome-related coronavirus
QCVNLITRTQSYTNSFTRGVYYPDKVFRSSVLHSTQDLFLPFFSNVTWFHAIHVSGTNGTKRFDNPALPFNDGVYFASTEKSNIIRGWIFGTTLDSKTQSLLIVNNATNVVIKVCEFQFCNDPFLDVYQKNNKSWMESEFRVYSSANNCTFEYVSQPFLMDLVGKEGNFKNLREFVFKNIDGYFKIYSKHTPINLERDLPQGFSALEPLVDLPIGINITRFQTLLALHRSYLTPVDSSSGWTAGAAAYYVGYLQPRTFLLKYNENGTITDAVDCALDPLSETKCTLKSFTVEKGIYQTSNFRVQPTESIVRFPNITNLCPFHEVFNATTFASVYAWNRKRISNCVADYSVIYNFAPFFAFKCYGVSPTKLNDLCFTNVYADSFVIRGNEVSQIAPGQTGNIADYNYKLPDDFTGCVIAWNSNKLDSKPSGNYNYLYRLLRKSKLKPFERDISTEIYQAGNRPCNGVAGPNCYSPLQSYGFRPTYGVGHQPYRVVVLSFELLHAPATVCGPKKSTNLVKNKCVNFNFNGLTGTGVLTESNKKFLPFQQFGRDIADTTDAVRDPQTLEILDITPCSFGGVSVITPGTNTSNQVAVLYQGVNCTEVPVAIHADQLTPTWRVYSTGSNVFQTRAGCLIGAEYVNNSYECDIPIGAGICASYQTQTKSHRRARSVASQSIIAYTMSLGAENSVAYSNNSIAIPTNFTISVTTEILPVSMTKTSVDCTMYICGDSTECSNLLLQYGSFCTQLKRALTGIAVEQDKNTQEVFAQVKQIYKTPPIKYFGGFNFSQILPDPSKPSKRSFIEDLLFNKVTLADAGFIKQYGDCLGDIAARDLICAQKFNGLTVLPPLLTDEMIAQYTSALLAGTITSGWTFGAGAALQIPFAMQMAYRFNGIGVTQNVLYENQKLIANQFNSAIGKIQDSLSSTASALGKLQDVVNHNAQALNTLVKQLSSKFGAISSVLNDILSRLDKVEAEVQIDRLITGRLQSLQTYVTQQLIRAAEIRASANLAATKMSECVLGQSKRVDFCGKGYHLMSFPQSAPHGVVFLHVTYVPAQEKNFTTAPAICHDGKAHFPREGVFVSNGTHWFVTQRNFYEPQIITTDNTFVSGNCDVVIGIVNNTVYDPLQPELDSFKEELDKYFKNHTSPDVDLGDISGINASVVNIQKEIDRLNEVAKNLNESLIDLQELGKYEQYIKWPWYIWLGFIAGLIAIVMVTIMLCCMTSCCSCLKGCCSCGSCCKFDEDDSEPVLKGVKLHYT

SEQ ID NO: 311 - protein, 1269 aa, synthetic construct
MFVFLVLLPLVSSQCVNLITRTQSYTNSFTRGVYYPDKVFRSSVLHSTQDLFLPFFSNVTWFHAIHVSGTNGTKRFDNPALPFNDGVYFASTEKSNIIRGWIFGTTLDSKTQSLLIVNNATNVVIKVCEFQFCNDPFLDVYQKNNKSWMESEFRVYSSANNCTFEYVSQPFLMDLVGKEGNFKNLREFVFKNIDGYFKIYSKHTPINLERDLPQGFSALEPLVDLPIGINITRFQTLLALHRSYLTPVDSSSGWTAGAAAYYVGYLQPRTFLLKYNENGTITDAVDCALDPLSETKCTLKSFTVEKGIYQTSNFRVQPTESIVRFPNITNLCPFHEVFNATTFASVYAWNRKRISNCVADYSVIYNFAPFFAFKCYGVSPTKLNDLCFTNVYADSFVIRGNEVSQIAPGQTGNIADYNYKLPDDFTGCVIAWNSNKLDSKPSGNYNYLYRLLRKSKLKPFERDISTEIYQAGNRPCNGVAGPNCYSPLQSYGFRPTYGVGHQPYRVVVLSFELLHAPATVCGPKKSTNLVKNKCVNFNFNGLTGTGVLTESNKKFLPFQQFGRDIADTTDAVRDPQTLEILDITPCSFGGVSVITPGTNTSNQVAVLYQGVNCTEVPVAIHADQLTPTWRVYSTGSNVFQTRAGCLIGAEYVNNSYECDIPIGAGICASYQTQTKSHQQAQSVASQSIIAYTMSLGAENSVAYSNNSIAIPTNFTISVTTEILPVSMTKTSVDCTMYICGDSTECSNLLLQYGSFCTQLKRALTGIAVEQDKNTQEVFAQVKQIYKTPPIKYFGGFNFSQILPDPSKPSKRSFIEDLLFNKVTLADAGFIKQYGDCLGDIAARDLICAQKFNGLTVLPPLLTDEMIAQYTSALLAGTITSGWTFGAGAALQIPFAMQMAYRFNGIGVTQNVLYENQKLIANQFNSAIGKIQDSLSSTASALGKLQDVVNHNAQALNTLVKQLSSKFGAISSVLNDILSRLDPPEAEVQIDRLITGRLQSLQTYVTQQLIRAAEIRASANLAATKMSECVLGQSKRVDFCGKGYHLMSFPQSAPHGVVFLHVTYVPAQEKNFTTAPAICHDGKAHFPREGVFVSNGTHWFVTQRNFYEPQIITTDNTFVSGNCDVVIGIVNNTVYDPLQPELDSFKEELDKYFKNHTSPDVDLGDISGINASVVNIQKEIDRLNEVAKNLNESLIDLQELGKYEQYIKWPWYIWLGFIAGLIAIVMVTIMLCCMTSCCSCLKGCCSCGSCCKFDEDDSEPVLKGVKLHYT

SEQ ID NO: 312 - protein, 1256 aa, synthetic construct
QCVNLITRTQSYTNSFTRGVYYPDKVFRSSVLHSTQDLFLPFFSNVTWFHAIHVSGTNGTKRFDNPALPFNDGVYFASTEKSNIIRGWIFGTTLDSKTQSLLIVNNATNVVIKVCEFQFCNDPFLDVYQKNNKSWMESEFRVYSSANNCTFEYVSQPFLMDLVGKEGNFKNLREFVFKNIDGYFKIYSKHTPINLERDLPQGFSALEPLVDLPIGINITRFQTLLALHRSYLTPVDSSSGWTAGAAAYYVGYLQPRTFLLKYNENGTITDAVDCALDPLSETKCTLKSFTVEKGIYQTSNFRVQPTESIVRFPNITNLCPFHEVFNATTFASVYAWNRKRISNCVADYSVIYNFAPFFAFKCYGVSPTKLNDLCFTNVYADSFVIRGNEVSQIAPGQTGNIADYNYKLPDDFTGCVIAWNSNKLDSKPSGNYNYLYRLLRKSKLKPFERDISTEIYQAGNRPCNGVAGPNCYSPLQSYGFRPTYGVGHQPYRVVVLSFELLHAPATVCGPKKSTNLVKNKCVNFNFNGLTGTGVLTESNKKFLPFQQFGRDIADTTDAVRDPQTLEILDITPCSFGGVSVITPGTNTSNQVAVLYQGVNCTEVPVAIHADQLTPTWRVYSTGSNVFQTRAGCLIGAEYVNNSYECDIPIGAGICASYQTQTKSHQQAQSVASQSIIAYTMSLGAENSVAYSNNSIAIPTNFTISVTTEILPVSMTKTSVDCTMYICGDSTECSNLLLQYGSFCTQLKRALTGIAVEQDKNTQEVFAQVKQIYKTPPIKYFGGFNFSQILPDPSKPSKRSFIEDLLFNKVTLADAGFIKQYGDCLGDIAARDLICAQKFNGLTVLPPLLTDEMIAQYTSALLAGTITSGWTFGAGAALQIPFAMQMAYRFNGIGVTQNVLYENQKLIANQFNSAIGKIQDSLSSTASALGKLQDVVNHNAQALNTLVKQLSSKFGAISSVLNDILSRLDPPEAEVQIDRLITGRLQSLQTYVTQQLIRAAEIRASANLAATKMSECVLGQSKRVDFCGKGYHLMSFPQSAPHGVVFLHVTYVPAQEKNFTTAPAICHDGKAHFPREGVFVSNGTHWFVTQRNFYEPQIITTDNTFVSGNCDVVIGIVNNTVYDPLQPELDSFKEELDKYFKNHTSPDVDLGDISGINASVVNIQKEIDRLNEVAKNLNESLIDLQELGKYEQYIKWPWYIWLGFIAGLIAIVMVTIMLCCMTSCCSCLKGCCSCGSCCKFDEDDSEPVLKGVKLHYT

SEQ ID NO: 313 - protein, 1269 aa, synthetic construct
MFVFLVLLPLVSSQCVNLITRTQSYTNSFTRGVYYPDKVFRSSVLHSTQDLFLPFFSNVTWFHAIHVSGTNGTKRFDNPALPFNDGVYFASTEKSNIIRGWIFGTTLDSKTQSLLIVNNATNVVIKVCEFQFCNDPFLDVYQKNNKSWMESEFRVYSSANNCTFEYVSQPFLMDLVGKEGNFKNLREFVFKNIDGYFKIYSKHTPINLERDLPQGFSALEPLVDLPIGINITRFQTLLALHRSYLTPVDSSSGWTAGAAAYYVGYLQPRTFLLKYNENGTITDAVDCALDPLSETKCTLKSFTVEKGIYQTSNFRVQPTESIVRFPNITNLCPFHEVFNATTFASVYAWNRKRISNCVADYSVIYNFAPFFAFKCYGVSPTKLNDLCFTNVYADSFVIRGNEVSQIAPGQTGNIADYNYKLPDDFTGCVIAWNSNKLDSKPSGNYNYLYRLLRKSKLKPFERDISTEIYQAGNRPCNGVAGPNCYSPLQSYGFRPTYGVGHQPYRVVVLSFELLHASATVCGPKKSTNLVKNKCVNFNFNGLTGTGVLTESNKKFLPFQQFGRDIADTTDAVRDPQTLEILDITPCSFGGVSVITPGTNTSNQVAVLYQGVNCTEVPVAIHADQLTPTWRVYSTGSNVFQTRAGCLIGAEYVNNSYECDIPIGAGICASYQTQTKSHRRARSVASQSIIAYTMSLGAENSVAYSNNSIAIPTNFTISVTTEILPVSMTKTSVDCTMYICGDSTECSNLLLQYGSFCTQLKRALTGIAVEQDKNTQEVFAQVKQIYKTPPIKYFGGFNFSQILPDPSKPSKRSFIEDLLFNKVTLADAGFIKQYGDCLGDIAARDLICAQKFNGLTVLPPLLTDEMIAQYTSALLAGTITSGWTFGAGAALQIPFAMQMAYRFNGIGVTQNVLYENQKLIANQFNSAIGKIQDSLSSTASALGKLQDVVNHNAQALNTLVKQLSSKFGAISSVLNDILSRLDKVEAEVQIDRLITGRLQSLQTYVTQQLIRAAEIRASANLAATKMSECVLGQSKRVDFCGKGYHLMSFPQSAPHGVVFLHVTYVPAQEKNFTTAPAICHDGKAHFPREGVFVSNGTHWFVTQRNFYEPQIITTDNTFVSGNCDVVIGIVNNTVYDPLQPELDSFKEELDKYFKNHTSPDVDLGDISGINASVVNIQKEIDRLNEVAKNLNESLIDLQELGKYEQYIKWPWYIWLGFIAGLIAIVMVTIMLCCMTSCCSCLKGCCSCGSCCKFDEDDSEPVLKGVKLHYT

SEQ ID NO: 314 - protein, 1256 aa, synthetic construct
QCVNLITRTQSYTNSFTRGVYYPDKVFRSSVLHSTQDLFLPFFSNVTWFHAIHVSGTNGTKRFDNPALPFNDGVYFASTEKSNIIRGWIFGTTLDSKTQSLLIVNNATNVVIKVCEFQFCNDPFLDVYQKNNKSWMESEFRVYSSANNCTFEYVSQPFLMDLVGKEGNFKNLREFVFKNIDGYFKIYSKHTPINLERDLPQGFSALEPLVDLPIGINITRFQTLLALHRSYLTPVDSSSGWTAGAAAYYVGYLQPRTFLLKYNENGTITDAVDCALDPLSETKCTLKSFTVEKGIYQTSNFRVQPTESIVRFPNITNLCPFHEVFNATTFASVYAWNRKRISNCVADYSVIYNFAPFFAFKCYGVSPTKLNDLCFTNVYADSFVIRGNEVSQIAPGQTGNIADYNYKLPDDFTGCVIAWNSNKLDSKPSGNYNYLYRLLRKSKLKPFERDISTEIYQAGNRPCNGVAGPNCYSPLQSYGFRPTYGVGHQPYRVVVLSFELLHASATVCGPKKSTNLVKNKCVNFNFNGLTGTGVLTESNKKFLPFQQFGRDIADTTDAVRDPQTLEILDITPCSFGGVSVITPGTNTSNQVAVLYQGVNCTEVPVAIHADQLTPTWRVYSTGSNVFQTRAGCLIGAEYVNNSYECDIPIGAGICASYQTQTKSHRRARSVASQSIIAYTMSLGAENSVAYSNNSIAIPTNFTISVTTEILPVSMTKTSVDCTMYICGDSTECSNLLLQYGSFCTQLKRALTGIAVEQDKNTQEVFAQVKQIYKTPPIKYFGGFNFSQILPDPSKPSKRSFIEDLLFNKVTLADAGFIKQYGDCLGDIAARDLICAQKFNGLTVLPPLLTDEMIAQYTSALLAGTITSGWTFGAGAALQIPFAMQMAYRFNGIGVTQNVLYENQKLIANQFNSAIGKIQDSLSSTASALGKLQDVVNHNAQALNTLVKQLSSKFGAISSVLNDILSRLDKVEAEVQIDRLITGRLQSLQTYVTQQLIRAAEIRASANLAATKMSECVLGQSKRVDFCGKGYHLMSFPQSAPHGVVFLHVTYVPAQEKNFTTAPAICHDGKAHFPREGVFVSNGTHWFVTQRNFYEPQIITTDNTFVSGNCDVVIGIVNNTVYDPLQPELDSFKEELDKYFKNHTSPDVDLGDISGINASVVNIQKEIDRLNEVAKNLNESLIDLQELGKYEQYIKWPWYIWLGFIAGLIAIVMVTIMLCCMTSCCSCLKGCCSCGSCCKFDEDDSEPVLKGVKLHYT

SEQ ID NO: 315 - protein, 1269 aa, synthetic construct
MFVFLVLLPLVSSQCVNLITRTQSYTNSFTRGVYYPDKVFRSSVLHSTQDLFLPFFSNVTWFHAIHVSGTNGTKRFDNPALPFNDGVYFASTEKSNIIRGWIFGTTLDSKTQSLLIVNNATNVVIKVCEFQFCNDPFLDVYQKNNKSWMESEFRVYSSANNCTFEYVSQPFLMDLVGKEGNFKNLREFVFKNIDGYFKIYSKHTPINLERDLPQGFSALEPLVDLPIGINITRFQTLLALHRSYLTPVDSSSGWTAGAAAYYVGYLQPRTFLLKYNENGTITDAVDCALDPLSETKCTLKSFTVEKGIYQTSNFRVQPTESIVRFPNITNLCPFHEVFNATTFASVYAWNRKRISNCVADYSVIYNFAPFFAFKCYGVSPTKLNDLCFTNVYADSFVIRGNEVSQIAPGQTGNIADYNYKLPDDFTGCVIAWNSNKLDSKPSGNYNYLYRLLRKSKLKPFERDISTEIYQAGNRPCNGVAGPNCYSPLQSYGFRPTYGVGHQPYRVVVLSFELLHASATVCGPKKSTNLVKNKCVNFNFNGLTGTGVLTESNKKFLPFQQFGRDIADTTDAVRDPQTLEILDITPCSFGGVSVITPGTNTSNQVAVLYQGVNCTEVPVAIHADQLTPTWRVYSTGSNVFQTRAGCLIGAEYVNNSYECDIPIGAGICASYQTQTKSHQQAQSVASQSIIAYTMSLGAENSVAYSNNSIAIPTNFTISVTTEILPVSMTKTSVDCTMYICGDSTECSNLLLQYGSFCTQLKRALTGIAVEQDKNTQEVFAQVKQIYKTPPIKYFGGFNFSQILPDPSKPSKRSFIEDLLFNKVTLADAGFIKQYGDCLGDIAARDLICAQKFNGLTVLPPLLTDEMIAQYTSALLAGTITSGWTFGAGAALQIPFAMQMAYRFNGIGVTQNVLYENQKLIANQFNSAIGKIQDSLSSTASALGKLQDVVNHNAQALNTLVKQLSSKFGAISSVLNDILSRLDPPEAEVQIDRLITGRLQSLQTYVTQQLIRAAEIRASANLAATKMSECVLGQSKRVDFCGKGYHLMSFPQSAPHGVVFLHVTYVPAQEKNFTTAPAICHDGKAHFPREGVFVSNGTHWFVTQRNFYEPQIITTDNTFVSGNCDVVIGIVNNTVYDPLQPELDSFKEELDKYFKNHTSPDVDLGDISGINASVVNIQKEIDRLNEVAKNLNESLIDLQELGKYEQYIKWPWYIWLGFIAGLIAIVMVTIMLCCMTSCCSCLKGCCSCGSCCKFDEDDSEPVLKGVKLHYT

SEQ ID NO: 316 - protein, 1256 aa, synthetic construct
QCVNLITRTQSYTNSFTRGVYYPDKVFRSSVLHSTQDLFLPFFSNVTWFHAIHVSGTNGTKRFDNPALPFNDGVYFASTEKSNIIRGWIFGTTLDSKTQSLLIVNNATNVVIKVCEFQFCNDPFLDVYQKNNKSWMESEFRVYSSANNCTFEYVSQPFLMDLVGKEGNFKNLREFVFKNIDGYFKIYSKHTPINLERDLPQGFSALEPLVDLPIGINITRFQTLLALHRSYLTPVDSSSGWTAGAAAYYVGYLQPRTFLLKYNENGTITDAVDCALDPLSETKCTLKSFTVEKGIYQTSNFRVQPTESIVRFPNITNLCPFHEVFNATTFASVYAWNRKRISNCVADYSVIYNFAPFFAFKCYGVSPTKLNDLCFTNVYADSFVIRGNEVSQIAPGQTGNIADYNYKLPDDFTGCVIAWNSNKLDSKPSGNYNYLYRLLRKSKLKPFERDISTEIYQAGNRPCNGVAGPNCYSPLQSYGFRPTYGVGHQPYRVVVLSFELLHASATVCGPKKSTNLVKNKCVNFNFNGLTGTGVLTESNKKFLPFQQFGRDIADTTDAVRDPQTLEILDITPCSFGGVSVITPGTNTSNQVAVLYQGVNCTEVPVAIHADQLTPTWRVYSTGSNVFQTRAGCLIGAEYVNNSYECDIPIGAGICASYQTQTKSHQQAQSVASQSIIAYTMSLGAENSVAYSNNSIAIPTNFTISVTTEILPVSMTKTSVDCTMYICGDSTECSNLLLQYGSFCTQLKRALTGIAVEQDKNTQEVFAQVKQIYKTPPIKYFGGFNFSQILPDPSKPSKRSFIEDLLFNKVTLADAGFIKQYGDCLGDIAARDLICAQKFNGLTVLPPLLTDEMIAQYTSALLAGTITSGWTFGAGAALQIPFAMQMAYRFNGIGVTQNVLYENQKLIANQFNSAIGKIQDSLSSTASALGKLQDVVNHNAQALNTLVKQLSSKFGAISSVLNDILSRLDPPEAEVQIDRLITGRLQSLQTYVTQQLIRAAEIRASANLAATKMSECVLGQSKRVDFCGKGYHLMSFPQSAPHGVVFLHVTYVPAQEKNFTTAPAICHDGKAHFPREGVFVSNGTHWFVTQRNFYEPQIITTDNTFVSGNCDVVIGIVNNTVYDPLQPELDSFKEELDKYFKNHTSPDVDLGDISGINASVVNIQKEIDRLNEVAKNLNESLIDLQELGKYEQYIKWPWYIWLGFIAGLIAIVMVTIMLCCMTSCCSCLKGCCSCGSCCKFDEDDSEPVLKGVKLHYT

SEQ ID NO: 317 - protein, 1269 aa, synthetic construct
MFVFLVLLPLVSSQCVNLITRTQSYTNSFTRGVYYPDKVFRSSVLHSTQDLFLPFFSNVTWFHAIHVSGTNGTKRFDNPALPFNDGVYFASTEKSNIIRGWIFGTTLDSKTQSLLIVNNATNVVIKVCEFQFCNDPFLDVYQKNNKSWMESEFRVYSSANNCTFEYVSQPFLMDLVGKEGNFKNLREFVFKNIDGYFKIYSKHTPINLERDLPQGFSALEPLVDLPIGINITRFQTLLALHRSYLTPVDSSSGWTAGAAAYYVGYLQPRTFLLKYNENGTITDAVDCALDPLSETKCTLKSFTVEKGIYQTSNFRVQPTESIVRFPNITNLCPFHEVFNATTFASVYAWNRKRISNCVADYSVIYNFAPFFAFKCYGVSPTKLNDLCFTNVYADSFVIRGNEVSQIAPGQTGNIADYNYKLPDDFTGCVIAWNSNKLDSTPSGNYNYLYRLLRKSKLKPFERDISTEIYQAGNRPCNGVAGPNCYSPLQSYGFRPTYGVGHQPYRVVVLSFELLHAPATVCGPKKSTNLVKNKCVNFNFNGLTGTGVLTESNKKFLPFQQFGRDIADTTDAVRDPQTLEILDITPCSFGGVSVITPGTNTSNQVAVLYQGVNCTEVPVAIHADQLTPTWRVYSTGSNVFQTRAGCLIGAEYVNNSYECDIPIGAGICASYQTQTKSHRRARSVASQSIIAYTMSLGAENSVAYSNNSIAIPTNFTISVTTEILPVSMTKTSVDCTMYICGDSTECSNLLLQYGSFCTQLKRALTGIAVEQDKNTQEVFAQVKQIYKTPPIKYFGGFNFSQILPDPSKPSKRSFIEDLLFNKVTLADAGFIKQYGDCLGDIAARDLICAQKFNGLTVLPPLLTDEMIAQYTSALLAGTITSGWTFGAGAALQIPFAMQMAYRFNGIGVTQNVLYENQKLIANQFNSAIGKIQDSLSSTASALGKLQDVVNHNAQALNTLVKQLSSKFGAISSVLNDILSRLDKVEAEVQIDRLITGRLQSLQTYVTQQLIRAAEIRASANLAATKMSECVLGQSKRVDFCGKGYHLMSFPQSAPHGVVFLHVTYVPAQEKNFTTAPAICHDGKAHFPREGVFVSNGTHWFVTQRNFYEPQIITTDNTFVSGNCDVVIGIVNNTVYDPLQPELDSFKEELDKYFKNHTSPDVDLGDISGINASVVNIQKEIDRLNEVAKNLNESLIDLQELGKYEQYIKWPWYIWLGFIAGLIAIVMVTIMLCCMTSCCSCLKGCCSCGSCCKFDEDDSEPVLKGVKLHYT

SEQ ID NO: 318 - protein, 1256 aa, synthetic construct
QCVNLITRTQSYTNSFTRGVYYPDKVFRSSVLHSTQDLFLPFFSNVTWFHAIHVSGTNGTKRFDNPALPFNDGVYFASTEKSNIIRGWIFGTTLDSKTQSLLIVNNATNVVIKVCEFQFCNDPFLDVYQKNNKSWMESEFRVYSSANNCTFEYVSQPFLMDLVGKEGNFKNLREFVFKNIDGYFKIYSKHTPINLERDLPQGFSALEPLVDLPIGINITRFQTLLALHRSYLTPVDSSSGWTAGAAAYYVGYLQPRTFLLKYNENGTITDAVDCALDPLSETKCTLKSFTVEKGIYQTSNFRVQPTESIVRFPNITNLCPFHEVFNATTFASVYAWNRKRISNCVADYSVIYNFAPFFAFKCYGVSPTKLNDLCFTNVYADSFVIRGNEVSQIAPGQTGNIADYNYKLPDDFTGCVIAWNSNKLDSTPSGNYNYLYRLLRKSKLKPFERDISTEIYQAGNRPCNGVAGPNCYSPLQSYGFRPTYGVGHQPYRVVVLSFELLHAPATVCGPKKSTNLVKNKCVNFNFNGLTGTGVLTESNKKFLPFQQFGRDIADTTDAVRDPQTLEILDITPCSFGGVSVITPGTNTSNQVAVLYQGVNCTEVPVAIHADQLTPTWRVYSTGSNVFQTRAGCLIGAEYVNNSYECDIPIGAGICASYQTQTKSHRRARSVASQSIIAYTMSLGAENSVAYSNNSIAIPTNFTISVTTEILPVSMTKTSVDCTMYICGDSTECSNLLLQYGSFCTQLKRALTGIAVEQDKNTQEVFAQVKQIYKTPPIKYFGGFNFSQILPDPSKPSKRSFIEDLLFNKVTLADAGFIKQYGDCLGDIAARDLICAQKFNGLTVLPPLLTDEMIAQYTSALLAGTITSGWTFGAGAALQIPFAMQMAYRFNGIGVTQNVLYENQKLIANQFNSAIGKIQDSLSSTASALGKLQDVVNHNAQALNTLVKQLSSKFGAISSVLNDILSRLDKVEAEVQIDRLITGRLQSLQTYVTQQLIRAAEIRASANLAATKMSECVLGQSKRVDFCGKGYHLMSFPQSAPHGVVFLHVTYVPAQEKNFTTAPAICHDGKAHFPREGVFVSNGTHWFVTQRNFYEPQIITTDNTFVSGNCDVVIGIVNNTVYDPLQPELDSFKEELDKYFKNHTSPDVDLGDISGINASVVNIQKEIDRLNEVAKNLNESLIDLQELGKYEQYIKWPWYIWLGFIAGLIAIVMVTIMLCCMTSCCSCLKGCCSCGSCCKFDEDDSEPVLKGVKLHYT

SEQ ID NO: 319 - protein, 1269 aa, synthetic construct
MFVFLVLLPLVSSQCVNLITRTQSYTNSFTRGVYYPDKVFRSSVLHSTQDLFLPFFSNVTWFHAIHVSGTNGTKRFDNPALPFNDGVYFASTEKSNIIRGWIFGTTLDSKTQSLLIVNNATNVVIKVCEFQFCNDPFLDVYQKNNKSWMESEFRVYSSANNCTFEYVSQPFLMDLVGKEGNFKNLREFVFKNIDGYFKIYSKHTPINLERDLPQGFSALEPLVDLPIGINITRFQTLLALHRSYLTPVDSSSGWTAGAAAYYVGYLQPRTFLLKYNENGTITDAVDCALDPLSETKCTLKSFTVEKGIYQTSNFRVQPTESIVRFPNITNLCPFHEVFNATTFASVYAWNRKRISNCVADYSVIYNFAPFFAFKCYGVSPTKLNDLCFTNVYADSFVIRGNEVSQIAPGQTGNIADYNYKLPDDFTGCVIAWNSNKLDSTPSGNYNYLYRLLRKSKLKPFERDISTEIYQAGNRPCNGVAGPNCYSPLQSYGFRPTYGVGHQPYRVVVLSFELLHAPATVCGPKKSTNLVKNKCVNFNFNGLTGTGVLTESNKKFLPFQQFGRDIADTTDAVRDPQTLEILDITPCSFGGVSVITPGTNTSNQVAVLYQGVNCTEVPVAIHADQLTPTWRVYSTGSNVFQTRAGCLIGAEYVNNSYECDIPIGAGICASYQTQTKSHQQAQSVASQSIIAYTMSLGAENSVAYSNNSIAIPTNFTISVTTEILPVSMTKTSVDCTMYICGDSTECSNLLLQYGSFCTQLKRALTGIAVEQDKNTQEVFAQVKQIYKTPPIKYFGGFNFSQILPDPSKPSKRSFIEDLLFNKVTLADAGFIKQYGDCLGDIAARDLICAQKFNGLTVLPPLLTDEMIAQYTSALLAGTITSGWTFGAGAALQIPFAMQMAYRFNGIGVTQNVLYENQKLIANQFNSAIGKIQDSLSSTASALGKLQDVVNHNAQALNTLVKQLSSKFGAISSVLNDILSRLDPPEAEVQIDRLITGRLQSLQTYVTQQLIRAAEIRASANLAATKMSECVLGQSKRVDFCGKGYHLMSFPQSAPHGVVFLHVTYVPAQEKNFTTAPAICHDGKAHFPREGVFVSNGTHWFVTQRNFYEPQIITTDNTFVSGNCDVVIGIVNNTVYDPLQPELDSFKEELDKYFKNHTSPDVDLGDISGINASVVNIQKEIDRLNEVAKNLNESLIDLQELGKYEQYIKWPWYIWLGFIAGLIAIVMVTIMLCCMTSCCSCLKGCCSCGSCCKFDEDDSEPVLKGVKLHYT

SEQ ID NO: 320 - protein, 1256 aa, synthetic construct
QCVNLITRTQSYTNSFTRGVYYPDKVFRSSVLHSTQDLFLPFFSNVTWFHAIHVSGTNGTKRFDNPALPFNDGVYFASTEKSNIIRGWIFGTTLDSKTQSLLIVNNATNVVIKVCEFQFCNDPFLDVYQKNNKSWMESEFRVYSSANNCTFEYVSQPFLMDLVGKEGNFKNLREFVFKNIDGYFKIYSKHTPINLERDLPQGFSALEPLVDLPIGINITRFQTLLALHRSYLTPVDSSSGWTAGAAAYYVGYLQPRTFLLKYNENGTITDAVDCALDPLSETKCTLKSFTVEKGIYQTSNFRVQPTESIVRFPNITNLCPFHEVFNATTFASVYAWNRKRISNCVADYSVIYNFAPFFAFKCYGVSPTKLNDLCFTNVYADSFVIRGNEVSQIAPGQTGNIADYNYKLPDDFTGCVIAWNSNKLDSTPSGNYNYLYRLLRKSKLKPFERDISTEIYQAGNRPCNGVAGPNCYSPLQSYGFRPTYGVGHQPYRVVVLSFELLHAPATVCGPKKSTNLVKNKCVNFNFNGLTGTGVLTESNKKFLPFQQFGRDIADTTDAVRDPQTLEILDITPCSFGGVSVITPGTNTSNQVAVLYQGVNCTEVPVAIHADQLTPTWRVYSTGSNVFQTRAGCLIGAEYVNNSYECDIPIGAGICASYQTQTKSHQQAQSVASQSIIAYTMSLGAENSVAYSNNSIAIPTNFTISVTTEILPVSMTKTSVDCTMYICGDSTECSNLLLQYGSFCTQLKRALTGIAVEQDKNTQEVFAQVKQIYKTPPIKYFGGFNFSQILPDPSKPSKRSFIEDLLFNKVTLADAGFIKQYGDCLGDIAARDLICAQKFNGLTVLPPLLTDEMIAQYTSALLAGTITSGWTFGAGAALQIPFAMQMAYRFNGIGVTQNVLYENQKLIANQFNSAIGKIQDSLSSTASALGKLQDVVNHNAQALNTLVKQLSSKFGAISSVLNDILSRLDPPEAEVQIDRLITGRLQSLQTYVTQQLIRAAEIRASANLAATKMSECVLGQSKRVDFCGKGYHLMSFPQSAPHGVVFLHVTYVPAQEKNFTTAPAICHDGKAHFPREGVFVSNGTHWFVTQRNFYEPQIITTDNTFVSGNCDVVIGIVNNTVYDPLQPELDSFKEELDKYFKNHTSPDVDLGDISGINASVVNIQKEIDRLNEVAKNLNESLIDLQELGKYEQYIKWPWYIWLGFIAGLIAIVMVTIMLCCMTSCCSCLKGCCSCGSCCKFDEDDSEPVLKGVKLHYT

SEQ ID NO: 321 - protein, 1269 aa, synthetic construct
MFVFLVLLPLVSSQCVNLITRTQSYTNSFTRGVYYPDKVFRSSVLHSTQDLFLPFFSNVTWFHAIHVSGTNGTKRFDNPALPFNDGVYFASTEKSNIIRGWIFGTTLDSKTQSLLIVNNATNVVIKVCEFQFCNDPFLDVYQKNNKSWMESEFRVYSSANNCTFEYVSQPFLMDLVGKEGNFKNLREFVFKNIDGYFKIYSKHTPINLERDLPQGFSALEPLVDLPIGINITRFQTLLALHRSYLTPVDSSSGWTAGAAAYYVGYLQPRTFLLKYNENGTITDAVDCALDPLSETKCTLKSFTVEKGIYQTSNFRVQPTESIVRFPNITNLCPFHEVFNATTFASVYAWNRKRISNCVADYSVIYNFAPFFAFKCYGVSPTKLNDLCFTNVYADSFVIRGNEVSQIAPGQTGNIADYNYKLPDDFTGCVIAWNSNKLDSKPSGNYNYLYRLLRKSKLKPFERDISTEIYQAGNRPCNGVAGSNCYSPLQSYGFRPTYGVGHQPYRVVVLSFELLHAPATVCGPKKSTNLVKNKCVNFNFNGLTGTGVLTESNKKFLPFQQFGRDIADTTDAVRDPQTLEILDITPCSFGGVSVITPGTNTSNQVAVLYQGVNCTEVPVAIHADQLTPTWRVYSTGSNVFQTRAGCLIGAEYVNNSYECDIPIGAGICASYQTQTKSHRRARSVASQSIIAYTMSLGAENSVAYSNNSIAIPTNFTISVTTEILPVSMTKTSVDCTMYICGDSTECSNLLLQYGSFCTQLKRALTGIAVEQDKNTQEVFAQVKQIYKTPPIKYFGGFNFSQILPDPSKPSKRSFIEDLLFNKVTLADAGFIKQYGDCLGDIAARDLICAQKFNGLTVLPPLLTDEMIAQYTSALLAGTITSGWTFGAGAALQIPFAMQMAYRFNGIGVTQNVLYENQKLIANQFNSAIGKIQDSLSSTASALGKLQDVVNHNAQALNTLVKQLSSKFGAISSVLNDILSRLDKVEAEVQIDRLITGRLQSLQTYVTQQLIRAAEIRASANLAATKMSECVLGQSKRVDFCGKGYHLMSFPQSAPHGVVFLHVTYVPAQEKNFTTAPAICHDGKAHFPREGVFVSNGTHWFVTQRNFYEPQIITTDNTFVSGNCDVVIGIVNNTVYDPLQPELDSFKEELDKYFKNHTSPDVDLGDISGINASVVNIQKEIDRLNEVAKNLNESLIDLQELGKYEQYIKWPWYIWLGFIAGLIAIVMVTIMLCCMTSCCSCLKGCCSCGSCCKFDEDDSEPVLKGVKLHYT

SEQ ID NO: 322 - protein, 1256 aa, synthetic construct
QCVNLITRTQSYTNSFTRGVYYPDKVFRSSVLHSTQDLFLPFFSNVTWFHAIHVSGTNGTKRFDNPALPFNDGVYFASTEKSNIIRGWIFGTTLDSKTQSLLIVNNATNVVIKVCEFQFCNDPFLDVYQKNNKSWMESEFRVYSSANNCTFEYVSQPFLMDLVGKEGNFKNLREFVFKNIDGYFKIYSKHTPINLERDLPQGFSALEPLVDLPIGINITRFQTLLALHRSYLTPVDSSSGWTAGAAAYYVGYLQPRTFLLKYNENGTITDAVDCALDPLSETKCTLKSFTVEKGIYQTSNFRVQPTESIVRFPNITNLCPFHEVFNATTFASVYAWNRKRISNCVADYSVIYNFAPFFAFKCYGVSPTKLNDLCFTNVYADSFVIRGNEVSQIAPGQTGNIADYNYKLPDDFTGCVIAWNSNKLDSKPSGNYNYLYRLLRKSKLKPFERDISTEIYQAGNRPCNGVAGSNCYSPLQSYGFRPTYGVGHQPYRVVVLSFELLHAPATVCGPKKSTNLVKNKCVNFNFNGLTGTGVLTESNKKFLPFQQFGRDIADTTDAVRDPQTLEILDITPCSFGGVSVITPGTNTSNQVAVLYQGVNCTEVPVAIHADQLTPTWRVYSTGSNVFQTRAGCLIGAEYVNNSYECDIPIGAGICASYQTQTKSHRRARSVASQSIIAYTMSLGAENSVAYSNNSIAIPTNFTISVTTEILPVSMTKTSVDCTMYICGDSTECSNLLLQYGSFCTQLKRALTGIAVEQDKNTQEVFAQVKQIYKTPPIKYFGGFNFSQILPDPSKPSKRSFIEDLLFNKVTLADAGFIKQYGDCLGDIAARDLICAQKFNGLTVLPPLLTDEMIAQYTSALLAGTITSGWTFGAGAALQIPFAMQMAYRFNGIGVTQNVLYENQKLIANQFNSAIGKIQDSLSSTASALGKLQDVVNHNAQALNTLVKQLSSKFGAISSVLNDILSRLDKVEAEVQIDRLITGRLQSLQTYVTQQLIRAAEIRASANLAATKMSECVLGQSKRVDFCGKGYHLMSFPQSAPHGVVFLHVTYVPAQEKNFTTAPAICHDGKAHFPREGVFVSNGTHWFVTQRNFYEPQIITTDNTFVSGNCDVVIGIVNNTVYDPLQPELDSFKEELDKYFKNHTSPDVDLGDISGINASVVNIQKEIDRLNEVAKNLNESLIDLQELGKYEQYIKWPWYIWLGFIAGLIAIVMVTIMLCCMTSCCSCLKGCCSCGSCCKFDEDDSEPVLKGVKLHYT

SEQ ID NO: 323 - protein, 1269 aa, synthetic construct
MFVFLVLLPLVSSQCVNLITRTQSYTNSFTRGVYYPDKVFRSSVLHSTQDLFLPFFSNVTWFHAIHVSGTNGTKRFDNPALPFNDGVYFASTEKSNIIRGWIFGTTLDSKTQSLLIVNNATNVVIKVCEFQFCNDPFLDVYQKNNKSWMESEFRVYSSANNCTFEYVSQPFLMDLVGKEGNFKNLREFVFKNIDGYFKIYSKHTPINLERDLPQGFSALEPLVDLPIGINITRFQTLLALHRSYLTPVDSSSGWTAGAAAYYVGYLQPRTFLLKYNENGTITDAVDCALDPLSETKCTLKSFTVEKGIYQTSNFRVQPTESIVRFPNITNLCPFHEVFNATTFASVYAWNRKRISNCVADYSVIYNFAPFFAFKCYGVSPTKLNDLCFTNVYADSFVIRGNEVSQIAPGQTGNIADYNYKLPDDFTGCVIAWNSNKLDSKPSGNYNYLYRLLRKSKLKPFERDISTEIYQAGNRPCNGVAGSNCYSPLQSYGFRPTYGVGHQPYRVVVLSFELLHAPATVCGPKKSTNLVKNKCVNFNFNGLTGTGVLTESNKKFLPFQQFGRDIADTTDAVRDPQTLEILDITPCSFGGVSVITPGTNTSNQVAVLYQGVNCTEVPVAIHADQLTPTWRVYSTGSNVFQTRAGCLIGAEYVNNSYECDIPIGAGICASYQTQTKSHQQAQSVASQSIIAYTMSLGAENSVAYSNNSIAIPTNFTISVTTEILPVSMTKTSVDCTMYICGDSTECSNLLLQYGSFCTQLKRALTGIAVEQDKNTQEVFAQVKQIYKTPPIKYFGGFNFSQILPDPSKPSKRSFIEDLLFNKVTLADAGFIKQYGDCLGDIAARDLICAQKFNGLTVLPPLLTDEMIAQYTSALLAGTITSGWTFGAGAALQIPFAMQMAYRFNGIGVTQNVLYENQKLIANQFNSAIGKIQDSLSSTASALGKLQDVVNHNAQALNTLVKQLSSKFGAISSVLNDILSRLDPPEAEVQIDRLITGRLQSLQTYVTQQLIRAAEIRASANLAATKMSECVLGQSKRVDFCGKGYHLMSFPQSAPHGVVFLHVTYVPAQEKNFTTAPAICHDGKAHFPREGVFVSNGTHWFVTQRNFYEPQIITTDNTFVSGNCDVVIGIVNNTVYDPLQPELDSFKEELDKYFKNHTSPDVDLGDISGINASVVNIQKEIDRLNEVAKNLNESLIDLQELGKYEQYIKWPWYIWLGFIAGLIAIVMVTIMLCCMTSCCSCLKGCCSCGSCCKFDEDDSEPVLKGVKLHYT

SEQ ID NO: 324 - protein, 1256 aa, synthetic construct
QCVNLITRTQSYTNSFTRGVYYPDKVFRSSVLHSTQDLFLPFFSNVTWFHAIHVSGTNGTKRFDNPALPFNDGVYFASTEKSNIIRGWIFGTTLDSKTQSLLIVNNATNVVIKVCEFQFCNDPFLDVYQKNNKSWMESEFRVYSSANNCTFEYVSQPFLMDLVGKEGNFKNLREFVFKNIDGYFKIYSKHTPINLERDLPQGFSALEPLVDLPIGINITRFQTLLALHRSYLTPVDSSSGWTAGAAAYYVGYLQPRTFLLKYNENGTITDAVDCALDPLSETKCTLKSFTVEKGIYQTSNFRVQPTESIVRFPNITNLCPFHEVFNATTFASVYAWNRKRISNCVADYSVIYNFAPFFAFKCYGVSPTKLNDLCFTNVYADSFVIRGNEVSQIAPGQTGNIADYNYKLPDDFTGCVIAWNSNKLDSKPSGNYNYLYRLLRKSKLKPFERDISTEIYQAGNRPCNGVAGSNCYSPLQSYGFRPTYGVGHQPYRVVVLSFELLHAPATVCGPKKSTNLVKNKCVNFNFNGLTGTGVLTESNKKFLPFQQFGRDIADTTDAVRDPQTLEILDITPCSFGGVSVITPGTNTSNQVAVLYQGVNCTEVPVAIHADQLTPTWRVYSTGSNVFQTRAGCLIGAEYVNNSYECDIPIGAGICASYQTQTKSHQQAQSVASQSIIAYTMSLGAENSVAYSNNSIAIPTNFTISVTTEILPVSMTKTSVDCTMYICGDSTECSNLLLQYGSFCTQLKRALTGIAVEQDKNTQEVFAQVKQIYKTPPIKYFGGFNFSQILPDPSKPSKRSFIEDLLFNKVTLADAGFIKQYGDCLGDIAARDLICAQKFNGLTVLPPLLTDEMIAQYTSALLAGTITSGWTFGAGAALQIPFAMQMAYRFNGIGVTQNVLYENQKLIANQFNSAIGKIQDSLSSTASALGKLQDVVNHNAQALNTLVKQLSSKFGAISSVLNDILSRLDPPEAEVQIDRLITGRLQSLQTYVTQQLIRAAEIRASANLAATKMSECVLGQSKRVDFCGKGYHLMSFPQSAPHGVVFLHVTYVPAQEKNFTTAPAICHDGKAHFPREGVFVSNGTHWFVTQRNFYEPQIITTDNTFVSGNCDVVIGIVNNTVYDPLQPELDSFKEELDKYFKNHTSPDVDLGDISGINASVVNIQKEIDRLNEVAKNLNESLIDLQELGKYEQYIKWPWYIWLGFIAGLIAIVMVTIMLCCMTSCCSCLKGCCSCGSCCKFDEDDSEPVLKGVKLHYT

SEQ ID NO: 325 - protein, 1269 aa, synthetic construct
MFVFLVLLPLVSSQCVNLITRTQSYTNSFTRGVYYPDKVFRSSVLHSTQDLFLPFFSNVTWFHAIHVSGTNGTKRFDNPALPFNDGVYFASTEKSNIIRGWIFGTTLDSKTQSLLIVNNATNVVIKVCEFQFCNDPFLDVYQKNNKSWMESEFRVYSSANNCTFEYVSQPFLMDLVGKEGNFKNLREFVFKNIDGYFKIYSKHTPINLERDLPQGFSALEPLVDLPIGINITRFQTLLALHRSYLTPVDSSSGWTAGAAAYYVGYLQPRTFLLKYNENGTITDAVDCALDPLSETKCTLKSFTVEKGIYQTSNFRVQPTESIVRFPNITNLCPFHEVFNATTFASVYAWNRKRISNCVADYSVIYNFAPFFAFKCYGVSPTKLNDLCFTNVYADSFVIRGNEVSQIAPGQTGNIADYNYKLPDDFTGCVIAWNSNKLDSKPSGNYNYLYRLLRKSKLKPFERDISTEIYQAGNKPCNGVAGPNCYSPLQSYGFRPTYGVGHQPYRVVVLSFELLHAPATVCGPKKSTNLVKNKCVNFNFNGLTGTGVLTESNKKFLPFQQFGRDIADTTDAVRDPQTLEILDITPCSFGGVSVITPGTNTSNQVAVLYQGVNCTEVPVAIHADQLTPTWRVYSTGSNVFQTRAGCLIGAEYVNNSYECDIPIGAGICASYQTQTKSHRRARSVASQSIIAYTMSLGAENSVAYSNNSIAIPTNFTISVTTEILPVSMTKTSVDCTMYICGDSTECSNLLLQYGSFCTQLKRALTGIAVEQDKNTQEVFAQVKQIYKTPPIKYFGGFNFSQILPDPSKPSKRSFIEDLLFNKVTLADAGFIKQYGDCLGDIAARDLICAQKFNGLTVLPPLLTDEMIAQYTSALLAGTITSGWTFGAGAALQIPFAMQMAYRFNGIGVTQNVLYENQKLIANQFNSAIGKIQDSLSSTASALGKLQDVVNHNAQALNTLVKQLSSKFGAISSVLNDILSRLDKVEAEVQIDRLITGRLQSLQTYVTQQLIRAAEIRASANLAATKMSECVLGQSKRVDFCGKGYHLMSFPQSAPHGVVFLHVTYVPAQEKNFTTAPAICHDGKAHFPREGVFVSNGTHWFVTQRNFYEPQIITTDNTFVSGNCDVVIGIVNNTVYDPLQPELDSFKEELDKYFKNHTSPDVDLGDISGINASVVNIQKEIDRLNEVAKNLNESLIDLQELGKYEQYIKWPWYIWLGFIAGLIAIVMVTIMLCCMTSCCSCLKGCCSCGSCCKFDEDDSEPVLKGVKLHYT

SEQ ID NO: 326 - protein, 1256 aa, synthetic construct
QCVNLITRTQSYTNSFTRGVYYPDKVFRSSVLHSTQDLFLPFFSNVTWFHAIHVSGTNGTKRFDNPALPFNDGVYFASTEKSNIIRGWIFGTTLDSKTQSLLIVNNATNVVIKVCEFQFCNDPFLDVYQKNNKSWMESEFRVYSSANNCTFEYVSQPFLMDLVGKEGNFKNLREFVFKNIDGYFKIYSKHTPINLERDLPQGFSALEPLVDLPIGINITRFQTLLALHRSYLTPVDSSSGWTAGAAAYYVGYLQPRTFLLKYNENGTITDAVDCALDPLSETKCTLKSFTVEKGIYQTSNFRVQPTESIVRFPNITNLCPFHEVFNATTFASVYAWNRKRISNCVADYSVIYNFAPFFAFKCYGVSPTKLNDLCFTNVYADSFVIRGNEVSQIAPGQTGNIADYNYKLPDDFTGCVIAWNSNKLDSKPSGNYNYLYRLLRKSKLKPFERDISTEIYQAGNKPCNGVAGPNCYSPLQSYGFRPTYGVGHQPYRVVVLSFELLHAPATVCGPKKSTNLVKNKCVNFNFNGLTGTGVLTESNKKFLPFQQFGRDIADTTDAVRDPQTLEILDITPCSFGGVSVITPGTNTSNQVAVLYQGVNCTEVPVAIHADQLTPTWRVYSTGSNVFQTRAGCLIGAEYVNNSYECDIPIGAGICASYQTQTKSHRRARSVASQSIIAYTMSLGAENSVAYSNNSIAIPTNFTISVTTEILPVSMTKTSVDCTMYICGDSTECSNLLLQYGSFCTQLKRALTGIAVEQDKNTQEVFAQVKQIYKTPPIKYFGGFNFSQILPDPSKPSKRSFIEDLLFNKVTLADAGFIKQYGDCLGDIAARDLICAQKFNGLTVLPPLLTDEMIAQYTSALLAGTITSGWTFGAGAALQIPFAMQMAYRFNGIGVTQNVLYENQKLIANQFNSAIGKIQDSLSSTASALGKLQDVVNHNAQALNTLVKQLSSKFGAISSVLNDILSRLDKVEAEVQIDRLITGRLQSLQTYVTQQLIRAAEIRASANLAATKMSECVLGQSKRVDFCGKGYHLMSFPQSAPHGVVFLHVTYVPAQEKNFTTAPAICHDGKAHFPREGVFVSNGTHWFVTQRNFYEPQIITTDNTFVSGNCDVVIGIVNNTVYDPLQPELDSFKEELDKYFKNHTSPDVDLGDISGINASVVNIQKEIDRLNEVAKNLNESLIDLQELGKYEQYIKWPWYIWLGFIAGLIAIVMVTIMLCCMTSCCSCLKGCCSCGSCCKFDEDDSEPVLKGVKLHYT

SEQ ID NO: 327 - protein, 1269 aa, synthetic construct
MFVFLVLLPLVSSQCVNLITRTQSYTNSFTRGVYYPDKVFRSSVLHSTQDLFLPFFSNVTWFHAIHVSGTNGTKRFDNPALPFNDGVYFASTEKSNIIRGWIFGTTLDSKTQSLLIVNNATNVVIKVCEFQFCNDPFLDVYQKNNKSWMESEFRVYSSANNCTFEYVSQPFLMDLVGKEGNFKNLREFVFKNIDGYFKIYSKHTPINLERDLPQGFSALEPLVDLPIGINITRFQTLLALHRSYLTPVDSSSGWTAGAAAYYVGYLQPRTFLLKYNENGTITDAVDCALDPLSETKCTLKSFTVEKGIYQTSNFRVQPTESIVRFPNITNLCPFHEVFNATTFASVYAWNRKRISNCVADYSVIYNFAPFFAFKCYGVSPTKLNDLCFTNVYADSFVIRGNEVSQIAPGQTGNIADYNYKLPDDFTGCVIAWNSNKLDSKPSGNYNYLYRLLRKSKLKPFERDISTEIYQAGNKPCNGVAGPNCYSPLQSYGFRPTYGVGHQPYRVVVLSFELLHAPATVCGPKKSTNLVKNKCVNFNFNGLTGTGVLTESNKKFLPFQQFGRDIADTTDAVRDPQTLEILDITPCSFGGVSVITPGTNTSNQVAVLYQGVNCTEVPVAIHADQLTPTWRVYSTGSNVFQTRAGCLIGAEYVNNSYECDIPIGAGICASYQTQTKSHQQAQSVASQSIIAYTMSLGAENSVAYSNNSIAIPTNFTISVTTEILPVSMTKTSVDCTMYICGDSTECSNLLLQYGSFCTQLKRALTGIAVEQDKNTQEVFAQVKQIYKTPPIKYFGGFNFSQILPDPSKPSKRSFIEDLLFNKVTLADAGFIKQYGDCLGDIAARDLICAQKFNGLTVLPPLLTDEMIAQYTSALLAGTITSGWTFGAGAALQIPFAMQMAYRFNGIGVTQNVLYENQKLIANQFNSAIGKIQDSLSSTASALGKLQDVVNHNAQALNTLVKQLSSKFGAISSVLNDILSRLDPPEAEVQIDRLITGRLQSLQTYVTQQLIRAAEIRASANLAATKMSECVLGQSKRVDFCGKGYHLMSFPQSAPHGVVFLHVTYVPAQEKNFTTAPAICHDGKAHFPREGVFVSNGTHWFVTQRNFYEPQIITTDNTFVSGNCDVVIGIVNNTVYDPLQPELDSFKEELDKYFKNHTSPDVDLGDISGINASVVNIQKEIDRLNEVAKNLNESLIDLQELGKYEQYIKWPWYIWLGFIAGLIAIVMVTIMLCCMTSCCSCLKGCCSCGSCCKFDEDDSEPVLKGVKLHYT

SEQ ID NO: 328 - protein, 1256 aa, synthetic construct
QCVNLITRTQSYTNSFTRGVYYPDKVFRSSVLHSTQDLFLPFFSNVTWFHAIHVSGTNGTKRFDNPALPFNDGVYFASTEKSNIIRGWIFGTTLDSKTQSLLIVNNATNVVIKVCEFQFCNDPFLDVYQKNNKSWMESEFRVYSSANNCTFEYVSQPFLMDLVGKEGNFKNLREFVFKNIDGYFKIYSKHTPINLERDLPQGFSALEPLVDLPIGINITRFQTLLALHRSYLTPVDSSSGWTAGAAAYYVGYLQPRTFLLKYNENGTITDAVDCALDPLSETKCTLKSFTVEKGIYQTSNFRVQPTESIVRFPNITNLCPFHEVFNATTFASVYAWNRKRISNCVADYSVIYNFAPFFAFKCYGVSPTKLNDLCFTNVYADSFVIRGNEVSQIAPGQTGNIADYNYKLPDDFTGCVIAWNSNKLDSKPSGNYNYLYRLLRKSKLKPFERDISTEIYQAGNKPCNGVAGPNCYSPLQSYGFRPTYGVGHQPYRVVVLSFELLHAPATVCGPKKSTNLVKNKCVNFNFNGLTGTGVLTESNKKFLPFQQFGRDIADTTDAVRDPQTLEILDITPCSFGGVSVITPGTNTSNQVAVLYQGVNCTEVPVAIHADQLTPTWRVYSTGSNVFQTRAGCLIGAEYVNNSYECDIPIGAGICASYQTQTKSHQQAQSVASQSIIAYTMSLGAENSVAYSNNSIAIPTNFTISVTTEILPVSMTKTSVDCTMYICGDSTECSNLLLQYGSFCTQLKRALTGIAVEQDKNTQEVFAQVKQIYKTPPIKYFGGFNFSQILPDPSKPSKRSFIEDLLFNKVTLADAGFIKQYGDCLGDIAARDLICAQKFNGLTVLPPLLTDEMIAQYTSALLAGTITSGWTFGAGAALQIPFAMQMAYRFNGIGVTQNVLYENQKLIANQFNSAIGKIQDSLSSTASALGKLQDVVNHNAQALNTLVKQLSSKFGAISSVLNDILSRLDPPEAEVQIDRLITGRLQSLQTYVTQQLIRAAEIRASANLAATKMSECVLGQSKRVDFCGKGYHLMSFPQSAPHGVVFLHVTYVPAQEKNFTTAPAICHDGKAHFPREGVFVSNGTHWFVTQRNFYEPQIITTDNTFVSGNCDVVIGIVNNTVYDPLQPELDSFKEELDKYFKNHTSPDVDLGDISGINASVVNIQKEIDRLNEVAKNLNESLIDLQELGKYEQYIKWPWYIWLGFIAGLIAIVMVTIMLCCMTSCCSCLKGCCSCGSCCKFDEDDSEPVLKGVKLHYT

SEQ ID NO: 329 - protein, 549 aa, Human orthopneumovirus
  source 1..549: note = Human respiratory syncytial virus A2
QNITEEFYQSTCSAVSKGYLSALRTGWYTSVITIELSNIKENKCNGTDAKVKLIKQELDKYKNAVTELQLLMQSTPPTNNRARRELPRFMNYTLNNAKKTNVTLSKKRKRRFLGFLLGVGSAIASGVAVSKVLHLEGEVNKIKSALLSTNKAVVSLSNGVSVLTSKVLDLKNYIDKQLLPIVNKQSCSISNIETVIEFQQKNNRLLEITREFSVNAGVTTPVSTYMLTNSELLSLINDMPITNDQKKLMSNNVQIVRQQSYSIMSIIKEEVLAYVVQLPLYGVIDTPCWKLHTSPLCTTNTKEGSNICLTRTDRGWYCDNAGSVSFFPQAETCKVQSNRVFCDTMNSLTLPSEINLCNVDIFNPKYDCKIMTSKTDVSSSVITSLGAIVSCYGKTKCTASNKNRGIIKTFSNGCDYVSNKGMDTVSVGNTLYYVNKQEGKSLYVKGEPIINFYDPLVFPSDEFDASISQVNEKINQSLAFIRKSDELLHNVNAGKSTTNIMITTIIIVIIVILLSLIAVGLLLYCKARSTPVTLSKDQLSGINNIAFSN

SEQ ID NO: 330 - protein, 574 aa, Human orthopneumovirus
  source 1..574: note = Human respiratory syncytial virus A2
MELLILKANAITTILTAVTFCFASGQNITEEFYQSTCSAVSKGYLSALRTGWYTSVITIELSNIKENKCNGTDAKVKLIKQELDKYKNAVTELQLLMQSTPPTNNRARRELPRFMNYTLNNAKKTNVTLSKKRKRRFLGFLLGVGSAIASGVAVSKVLHLEGEVNKIKSALLSTNKAVVSLSNGVSVLTSKVLDLKNYIDKQLLPIVNKQSCSISNIETVIEFQQKNNRLLEITREFSVNAGVTTPVSTYMLTNSELLSLINDMPITNDQKKLMSNNVQIVRQQSYSIMSIIKEEVLAYVVQLPLYGVIDTPCWKLHTSPLCTTNTKEGSNICLTRTDRGWYCDNAGSVSFFPQAETCKVQSNRVFCDTMNSLTLPSEINLCNVDIFNPKYDCKIMTSKTDVSSSVITSLGAIVSCYGKTKCTASNKNRGIIKTFSNGCDYVSNKGMDTVSVGNTLYYVNKQEGKSLYVKGEPIINFYDPLVFPSDEFDASISQVNEKINQSLAFIRKSDELLHNVNAGKSTTNIMITTIIIVIIVILLSLIAVGLLLYCKARSTPVTLSKDQLSGINNIAFSN

SEQ ID NO: 331 - protein, 539 aa, synthetic construct
QNITEEFYQSTCSAVSKGYLSALRTGWYTSVITIELSNIKENKCNGTDAKVKLIKQELDKYKNAVTELQLLMQSTPATNNRARRELPRFMNYTLNNAKKTNVTLSKKQKQQAIASGVAVSKVLHLEGEVNKIKSALLSTNKAVVSLSNGVSVLTSKVLDLKNYIDKQLLPIVNKQSCSISNIETVIEFQQKNNRLLEITREFSVNAGVTTPVSTYMLTNSELLSLINDMPITNDQKKLMSNNVQIVRQQSYSIMSIIKEEVLAYVVQLPLYGVIDTPCWKLHTSPLCTTNTKEGSNICLTRTDRGWYCDNAGSVSFFPQAETCKVQSNRVFCDTMNSLTLPSEVNLCNVDIFNPKYDCKIMTSKTDVSSSVITSLGAIVSCYGKTKCTASNKNRGIIKTFSNGCDYVSNKGVDTVSVGNTLYYVNKQEGKSLYVKGEPIINFYDPLVFPSDEFDASISQVNEKINQSLAFIRKSDELLHNVNAGKSTTNIMITTIIIVIIVILLSLIAVGLLLYCKARSTPVTLSKDQLSGINNIAFSN

SEQ ID NO: 332 - protein, 564 aa, synthetic construct
MELLILKANAITTILTAVTFCFASGQNITEEFYQSTCSAVSKGYLSALRTGWYTSVITIELSNIKENKCNGTDAKVKLIKQELDKYKNAVTELQLLMQSTPATNNRARRELPRFMNYTLNNAKKTNVTLSKKQKQQAIASGVAVSKVLHLEGEVNKIKSALLSTNKAVVSLSNGVSVLTSKVLDLKNYIDKQLLPIVNKQSCSISNIETVIEFQQKNNRLLEITREFSVNAGVTTPVSTYMLTNSELLSLINDMPITNDQKKLMSNNVQIVRQQSYSIMSIIKEEVLAYVVQLPLYGVIDTPCWKLHTSPLCTTNTKEGSNICLTRTDRGWYCDNAGSVSFFPQAETCKVQSNRVFCDTMNSLTLPSEVNLCNVDIFNPKYDCKIMTSKTDVSSSVITSLGAIVSCYGKTKCTASNKNRGIIKTFSNGCDYVSNKGVDTVSVGNTLYYVNKQEGKSLYVKGEPIINFYDPLVFPSDEFDASISQVNEKINQSLAFIRKSDELLHNVNAGKSTTNIMITTIIIVIIVILLSLIAVGLLLYCKARSTPVTLSKDQLSGINNIAFSN

SEQ ID NO: 333 - protein, 564 aa, synthetic construct
MELLILKANAITTILTAVTFCFASGQNITEEFYQSTCSAVSKGYLSALRTGWYTSVITIELSNIKENKCNGTDAKVKLIKQELDKYKNAVTELQLLMQSTPATNNRARRELPRFMNYTLNNAKKTNVTLSKKQKQQAIASGVAVSKVLHLEGEVNKIKSALLSTNKAVVSLSNGVSVLTFKVLDLKNYIDKQLLPILNKQSCSISNIETVIEFQQKNNRLLEITREFSVNAGVTTPVSTYMLTNSELLSLINDMPITNDQKKLMSNNVQIVRQQSYSIMSIIKEEVLAYVVQLPLYGVIDTPCWKLHTSPLCTTNTKEGSNICLTRTDRGWYCDNAGSVSFFPQAETCKVQSNRVFCDTMNSLTLPSEVNLCNVDIFNPKYDCKIMTSKTDVSSSVITSLGAIVSCYGKTKCTASNKNRGIIKTFSNGCDYVSNKGVDTVSVGNTLYYVNKQEGKSLYVKGEPIINFYDPLVFPSDEFDASISQVNEKINQSLAFIRKSDELLHNVNAGKSTTNIMITTIIIVIIVILLSLIAVGLLLYCKARSTPVTLSKDQLSGINNIAFSN

SEQ ID NO: 334 - protein, 564 aa, synthetic construct
MELLILKANAITTILTAVTFCFASGQNITEEFYQSTCSAVSKGYLSALRTGWYTSVITIELSNIKENKCNGTDAKVKLIKQELDKYKNAVTELQLLMQSTPATNNRARRELPRFMQYTLNNAKKTNVTLSKKQKQQAIASGVAVSKVLHLEGEVNKIKSALLSTNKAVVSLSNGVSVLTSKVLDLKNYIDKQLLPIVNKQSCSISNIETVIEFQQKNNRLLEITREFSVNAGVTTPVSTYMLTNSELLSLINDMPITNDQKKLMSNNVQIVRQQSYSIMSIIKEEVLAYVVQLPLYGVIDTPCWKLHTSPLCTTNTKEGSNICLTRTDRGWYCDNAGSVSFFPQAETCKVQSNRVFCDTMNSLTLPSEVNLCNVDIFNPKYDCKIMTSKTDVSSSVITSLGAIVSCYGKTKCTASNKNRGIIKTFSNGCDYVSNKGVDTVSVGNTLYYVNKQEGKSLYVKGEPIINFYDPLVFPSDEFDASISQVNEKINQSLAFIRKSDELLHNVNAGKSTTNIMITTIIIVIIVILLSLIAVGLLLYCKARSTPVTLSKDQLSGINNIAFSN

SEQ ID NO: 335 - protein, 564 aa, synthetic construct
MELLILKANAITTILTAVTFCFASGQNITEEFYQSTCSAVSKGYLSALRTGWYTSVITIELSNIKENKCNGTDAKVKLIKQELDKYKNAVTELQLLMQSTPATNNRARRELPRFMNYTLNNAKKTNVTLSKKQKQQAIASGVAVCKVLHLEGEVNKIKSALLSTNKAVVSLSNGVSVLTSKVLDLKNYIDKQLLPIVNKQSCSISNIETVIEFQQKNNRLLEITREFSVNAGVTTPVSTYMLTNSELLSLINDMPITNDQKKLMSNNVQIVRQQSYSIMCIIKEEVLAYVVQLPLYGVIDTPCWKLHTSPLCTTNTKEGSNICLTRTDRGWYCDNAGSVSFFPQAETCKVQSNRVFCDTMNSLTLPSEVNLCNVDIFNPKYDCKIMTSKTDVSSSVITSLGAIVSCYGKTKCTASNKNRGIIKTFSNGCDYVSNKGVDTVSVGNTLYYVNKQEGKSLYVKGEPIINFYDPLVFPSDEFDASISQVNEKINQSLAFIRKSDELLHNVNAGKSTTNIMITTIIIVIIVILLSLIAVGLLLYCKARSTPVTLSKDQLSGINNIAFSN

SEQ ID NO: 336 - protein, 564 aa, synthetic construct
MELLILKANAITTILTAVTFCFASGQNITEEFYQSTCSAVSKGYLSALRTGWYTSVITIELSNIKENKCNGTDAKVKLIKQELDKYKNAVTELQLLMQSTPATNNRARRELPRFMNYTLNNAKKTNVTLSKKQKQQAIASGVAVCKVLHLEGEVNKIKSALLSTNKAVVSLSNGVSVLTFKVLDLKNYIDKQLLPILNKQSCSISNIETVIEFQQKNNRLLEITREFSVNAGVTTPVSTYMLTNSELLSLINDMPITNDQKKLMSNNVQIVRQQSYSIMCIIKEEVLAYVVQLPLYGVIDTPCWKLHTSPLCTTNTKEGSNICLTRTDRGWYCDNAGSVSFFPQAETCKVQSNRVFCDTMNSLTLPSEVNLCNVDIFNPKYDCKIMTSKTDVSSSVITSLGAIVSCYGKTKCTASNKNRGIIKTFSNGCDYVSNKGVDTVSVGNTLYYVNKQEGKSLYVKGEPIINFYDPLVFPSDEFDASISQVNEKINQSLAFIRKSDELLHNVNAGKSTTNIMITTIIIVIIVILLSLIAVGLLLYCKARSTPVTLSKDQLSGINNIAFSN

SEQ ID NO: 337 - protein, 539 aa, synthetic construct
QNITEEFYQSTCSAVSKGYLSALRTGWYTSVITIELSNIKENKCNGTDAKVKLIKQELDKYKNAVTELQLLMQSTPATNNRARRELPRFMNYTLNNAKKTNVTLSKKQKQQAIASGVAVSKVLHLEGEVNKIKSALLSTNKAVVSLSNGVSVLTFKVLDLKNYIDKQLLPILNKQSCSISNIETVIEFQQKNNRLLEITREFSVNAGVTTPVSTYMLTNSELLSLINDMPITNDQKKLMSNNVQIVRQQSYSIMSIIKEEVLAYVVQLPLYGVIDTPCWKLHTSPLCTTNTKEGSNICLTRTDRGWYCDNAGSVSFFPQAETCKVQSNRVFCDTMNSLTLPSEVNLCNVDIFNPKYDCKIMTSKTDVSSSVITSLGAIVSCYGKTKCTASNKNRGIIKTFSNGCDYVSNKGVDTVSVGNTLYYVNKQEGKSLYVKGEPIINFYDPLVFPSDEFDASISQVNEKINQSLAFIRKSDELLHNVNAGKSTTNIMITTIIIVIIVILLSLIAVGLLLYCKARSTPVTLSKDQLSGINNIAFSN

SEQ ID NO: 338 - protein, 539 aa, synthetic construct
QNITEEFYQSTCSAVSKGYLSALRTGWYTSVITIELSNIKENKCNGTDAKVKLIKQELDKYKNAVTELQLLMQSTPATNNRARRELPRFMQYTLNNAKKTNVTLSKKQKQQAIASGVAVSKVLHLEGEVNKIKSALLSTNKAVVSLSNGVSVLTSKVLDLKNYIDKQLLPIVNKQSCSISNIETVIEFQQKNNRLLEITREFSVNAGVTTPVSTYMLTNSELLSLINDMPITNDQKKLMSNNVQIVRQQSYSIMSIIKEEVLAYVVQLPLYGVIDTPCWKLHTSPLCTTNTKEGSNICLTRTDRGWYCDNAGSVSFFPQAETCKVQSNRVFCDTMNSLTLPSEVNLCNVDIFNPKYDCKIMTSKTDVSSSVITSLGAIVSCYGKTKCTASNKNRGIIKTFSNGCDYVSNKGVDTVSVGNTLYYVNKQEGKSLYVKGEPIINFYDPLVFPSDEFDASISQVNEKINQSLAFIRKSDELLHNVNAGKSTTNIMITTIIIVIIVILLSLIAVGLLLYCKARSTPVTLSKDQLSGINNIAFSN

SEQ ID NO: 339 - protein, 539 aa, synthetic construct
QNITEEFYQSTCSAVSKGYLSALRTGWYTSVITIELSNIKENKCNGTDAKVKLIKQELDKYKNAVTELQLLMQSTPATNNRARRELPRFMNYTLNNAKKTNVTLSKKQKQQAIASGVAVCKVLHLEGEVNKIKSALLSTNKAVVSLSNGVSVLTSKVLDLKNYIDKQLLPIVNKQSCSISNIETVIEFQQKNNRLLEITREFSVNAGVTTPVSTYMLTNSELLSLINDMPITNDQKKLMSNNVQIVRQQSYSIMCIIKEEVLAYVVQLPLYGVIDTPCWKLHTSPLCTTNTKEGSNICLTRTDRGWYCDNAGSVSFFPQAETCKVQSNRVFCDTMNSLTLPSEVNLCNVDIFNPKYDCKIMTSKTDVSSSVITSLGAIVSCYGKTKCTASNKNRGIIKTFSNGCDYVSNKGVDTVSVGNTLYYVNKQEGKSLYVKGEPIINFYDPLVFPSDEFDASISQVNEKINQSLAFIRKSDELLHNVNAGKSTTNIMITTIIIVIIVILLSLIAVGLLLYCKARSTPVTLSKDQLSGINNIAFSN

SEQ ID NO: 340 - protein, 539 aa, synthetic construct
QNITEEFYQSTCSAVSKGYLSALRTGWYTSVITIELSNIKENKCNGTDAKVKLIKQELDKYKNAVTELQLLMQSTPATNNRARRELPRFMNYTLNNAKKTNVTLSKKQKQQAIASGVAVCKVLHLEGEVNKIKSALLSTNKAVVSLSNGVSVLTFKVLDLKNYIDKQLLPILNKQSCSISNIETVIEFQQKNNRLLEITREFSVNAGVTTPVSTYMLTNSELLSLINDMPITNDQKKLMSNNVQIVRQQSYSIMCIIKEEVLAYVVQLPLYGVIDTPCWKLHTSPLCTTNTKEGSNICLTRTDRGWYCDNAGSVSFFPQAETCKVQSNRVFCDTMNSLTLPSEVNLCNVDIFNPKYDCKIMTSKTDVSSSVITSLGAIVSCYGKTKCTASNKNRGIIKTFSNGCDYVSNKGVDTVSVGNTLYYVNKQEGKSLYVKGEPIINFYDPLVFPSDEFDASISQVNEKINQSLAFIRKSDELLHNVNAGKSTTNIMITTIIIVIIVILLSLIAVGLLLYCKARSTPVTLSKDQLSGINNIAFSN

SEQ ID NO: 341 - protein, 6 aa, Human orthopneumovirus
  source 1..6: note = Human respiratory syncytial virus A2
KKRKRR

SEQ ID NO: 342 - protein, 6 aa, synthetic construct
KKQKQQ

SEQ ID NO: 343 - protein, 6 aa, synthetic construct
QKQKQQ

SEQ ID NO: 344 - protein, 6 aa, synthetic construct
KKQKRQ

SEQ ID NO: 345 - protein, 6 aa, synthetic construct
GRRQQR

SEQ ID NO: 346 - protein, 4 aa, Human orthopneumovirus
  source 1..4: note = Human respiratory syncytial virus A2
RARR

SEQ ID NO: 347 - protein, 4 aa, synthetic construct
QQAQ

SEQ ID NO: 348 - protein, 4 aa, synthetic construct
RAQQ

SEQ ID NO: 349 - protein, 4 aa, synthetic construct
RANN

SEQ ID NO: 350 - protein, 390 aa, Human orthopneumovirus
  source 1..390: note = Human respiratory syncytial virus A2
FLGFLLGVGSAIASGVAVSKVLHLEGEVNKIKSALLSTNKAVVSLSNGVSVLTSKVLDLKNYIDKQLLPIVNKQSCSISNIETVIEFQQKNNRLLEITREFSVNAGVTTPVSTYMLTNSELLSLINDMPITNDQKKLMSNNVQIVRQQSYSIMSIIKEEVLAYVVQLPLYGVIDTPCWKLHTSPLCTTNTKEGSNICLTRTDRGWYCDNAGSVSFFPQAETCKVQSNRVFCDTMNSLTLPSEVNLCNVDIFNPKYDCKIMTSKTDVSSSVITSLGAIVSCYGKTKCTASNKNRGIIKTFSNGCDYVSNKGVDTVSVGNTLYYVNKQEGKSLYVKGEPIINFYDPLVFPSDEFDASISQVNEKINQSLAFIRKSDELLHNVNAGKSTTNIM

SEQ ID NO: 351 - protein, 380 aa, synthetic construct
AIASGVAVSKVLHLEGEVNKIKSALLSTNKAVVSLSNGVSVLTSKVLDLKNYIDKQLLPIVNKQSCSISNIETVIEFQQKNNRLLEITREFSVNAGVTTPVSTYMLTNSELLSLINDMPITNDQKKLMSNNVQIVRQQSYSIMSIIKEEVLAYVVQLPLYGVIDTPCWKLHTSPLCTTNTKEGSNICLTRTDRGWYCDNAGSVSFFPQAETCKVQSNRVFCDTMNSLTLPSEVNLCNVDIFNPKYDCKIMTSKTDVSSSVITSLGAIVSCYGKTKCTASNKNRGIIKTFSNGCDYVSNKGVDTVSVGNTLYYVNKQEGKSLYVKGEPIINFYDPLVFPSDEFDASISQVNEKINQSLAFIRKSDELLHNVNAGKSTTNIM

SEQ ID NO: 352 - protein, 380 aa, synthetic construct
AIASGVAVSKVLHLEGEVNKIKSALLSTNKAVVSLSNGVSVLTFKVLDLKNYIDKQLLPILNKQSCSISNIETVIEFQQKNNRLLEITREFSVNAGVTTPVSTYMLTNSELLSLINDMPITNDQKKLMSNNVQIVRQQSYSIMSIIKEEVLAYVVQLPLYGVIDTPCWKLHTSPLCTTNTKEGSNICLTRTDRGWYCDNAGSVSFFPQAETCKVQSNRVFCDTMNSLTLPSEVNLCNVDIFNPKYDCKIMTSKTDVSSSVITSLGAIVSCYGKTKCTASNKNRGIIKTFSNGCDYVSNKGVDTVSVGNTLYYVNKQEGKSLYVKGEPIINFYDPLVFPSDEFDASISQVNEKINQSLAFIRKSDELLHNVNAGKSTTNIM

SEQ ID NO: 353 - protein, 380 aa, synthetic construct; identical to SEQ ID NO: 351

SEQ ID NO: 354 - protein, 380 aa, synthetic construct
AIASGVAVCKVLHLEGEVNKIKSALLSTNKAVVSLSNGVSVLTSKVLDLKNYIDKQLLPIVNKQSCSISNIETVIEFQQKNNRLLEITREFSVNAGVTTPVSTYMLTNSELLSLINDMPITNDQKKLMSNNVQIVRQQSYSIMCIIKEEVLAYVVQLPLYGVIDTPCWKLHTSPLCTTNTKEGSNICLTRTDRGWYCDNAGSVSFFPQAETCKVQSNRVFCDTMNSLTLPSEVNLCNVDIFNPKYDCKIMTSKTDVSSSVITSLGAIVSCYGKTKCTASNKNRGIIKTFSNGCDYVSNKGVDTVSVGNTLYYVNKQEGKSLYVKGEPIINFYDPLVFPSDEFDASISQVNEKINQSLAFIRKSDELLHNVNAGKSTTNIM

SEQ ID NO: 355 - protein, 380 aa, synthetic construct
AIASGVAVCKVLHLEGEVNKIKSALLSTNKAVVSLSNGVSVLTFKVLDLKNYIDKQLLPILNKQSCSISNIETVIEFQQKNNRLLEITREFSVNAGVTTPVSTYMLTNSELLSLINDMPITNDQKKLMSNNVQIVRQQSYSIMCIIKEEVLAYVVQLPLYGVIDTPCWKLHTSPLCTTNTKEGSNICLTRTDRGWYCDNAGSVSFFPQAETCKVQSNRVFCDTMNSLTLPSEVNLCNVDIFNPKYDCKIMTSKTDVSSSVITSLGAIVSCYGKTKCTASNKNRGIIKTFSNGCDYVSNKGVDTVSVGNTLYYVNKQEGKSLYVKGEPIINFYDPLVFPSDEFDASISQVNEKINQSLAFIRKSDELLHNVNAGKSTTNIM

SEQ ID NO: 356 - protein, 84 aa, Human orthopneumovirus
  source 1..84: note = Human respiratory syncytial virus A2
QNITEEFYQSTCSAVSKGYLSALRTGWYTSVITIELSNIKENKCNGTDAKVKLIKQELDKYKNAVTELQLLMQSTPPTNNRARR

SEQ ID NO: 357 - protein, 84 aa, synthetic construct
QNITEEFYQSTCSAVSKGYLSALRTGWYTSVITIELSNIKENKCNGTDAKVKLIKQELDKYKNAVTELQLLMQSTPATNNRARR

SEQ ID NO: 358 - protein, 27 aa, Human orthopneumovirus
  source 1..27: note = Human respiratory syncytial virus A2
ELPRFMNYTLNNAKKTNVTLSKKQKQQ

SEQ ID NO: 359 - protein, 27 aa, synthetic construct
ELPRFMQYTLNNAKKTNVTLSKKQKQQ

SEQ ID NO: 360 - protein, 25 aa, Human orthopneumovirus
  source 1..25: note = Human respiratory syncytial virus A2
MELLILKANAITTILTAVTFCFASG

SEQ ID NO: 361 - DNA, 1695 bp, synthetic construct
  source 1..1695: mol_type = other DNA
atggagctgctcatcttgaaggctaacgccattaccactatccttacagcggtgacgttctgctttgcatccggtcagaatattaccgaagagttctaccaatctacttgtagcgctgtctcaaaaggctatctgtcggccctccgtacaggatggtacacgagtgttatcaccatcgaattgtccaacattaaggagaacaagtgcaacggtactgacgcgaaggtaaagcttatcaaacaggaactggataagtacaagaacgcagtgacagagctccaattgctgatgcagtctacccccgctacgaataaccgcgctaggagagaacttccacgattcatgaactatactctcaataacgccaaaaagaccaacgtcacattgagcaaaaagcagaagcaacaggctattgcgtcgggcgtagccgtgagtaaagtccttcacttggagggagaagttaataagatcaagtccgcactcctgtctactaacaaagctgtggtcagcttgtcaaacggtgtatccgtgctgacctcgaaggttcttgacctcaaaaattacatcgataagcaattgctgccgattgtcaacaagcagagttgttctatcagcaatattgagacggtgatcgagttccaacagaaaaacaacagactcctggaaatcacacgtgagttttcagtaaatgccggcgttactacccccgtctccacgtacatgcttacaaactcggaattgctcagtctgattaacgacatgcctatcactaatgatcagaagaagcttatgtctaacaacgtgcaaattgtccgccagcaaagctattccatcatgtcaatcattaaagaggaagtgttggcgtacgtagttcagctcccactgtacggagtcatcgacaccccgtgctggaagcttcatacctcgcccttgtgtacgacaaatactaaagagggttctaacatttgcctcaccaggacggatcgaggctggtattgcgataacgctggaagtgtgagcttcttccctcaagcagaaacatgtaaggtacagtccaatagagttttttgcgacactatgaactcactgacccttccatctgaggtcaatttgtgtaacgtcgatatcttcaacccgaagtacgactgcaaaattatgacgtccaagacagatgtgtcgagtagcgtaatcacttcactcggtgccatcgtttcttgctacggcaagaccaaatgtacggcttccaataagaaccgtggaattatcaaaacattctcgaacggttgcgactatgtcagcaataagggcgtggacactgtgagtgtaggaaacaccctgtactacgttaacaagcaagaaggtaaatcactgtatgtcaagggcgagcccattatcaatttttacgatcctcttgtgttcccatccgacgagttcgatgcgtctatcagccaggtaaacgaaaagattaaccagtccttggcatttatccgcaaatcggacgagctcctgcacaatgttaacgccggaaagagtacgacaaacattatgatcactaccatcattatcgtcattatcgtgatccttttgtcactcattgctgtaggtctgcttttgtactgtaaagcgaggtctacgcccgttacactcagcaaggatcaactgtccggcatcaataacattgccttctcgaattaa

SEQ ID NO: 362 - protein, 48 aa, Human orthopneumovirus
  source 1..48: note = Human respiratory syncytial virus A2
ITTIIIVIIVILLSLIAVGLLLYCKARSTPVTLSKDQLSGINNIAFSN

SEQ ID NO: 363 - protein, 1269 aa, synthetic construct
MFVFLVLLPLVSSQCVMPLFNLITTTQSYTNSFTRGVYYPDKVFRSSVLHLTQDLFLPFFSNVTWFHAISGTNGTKRFDNPVLPFNDGVYFASTEKSNIIRGWIFGTTLDSKTQSLLIVNNATNVFIKVCEFQFCNDPFLDVYHKNNKSWMESESGVYSSANNCTFEYVSQPFLMDLEGKQGNFKNLREFVFKNIDGYFKIYSKHTPIIGRDFPQGFSALEPLVDLPIGINITRFQTLLALNRSYLTPGDSSSGWTAGAADYYVGYLQPRTFLLKYNENGTITDAVDCALDPLSETKCTLKSFTVEKGIYQTSNFRVQPTESIVRFPNVTNLCPFHEVFNATRFASVYAWNRTRISNCVADYSVLYNFAPFFAFKCYGVSPTKLNDLCFTNVYADSFVIKGNEVSQIAPGQTGNIADYNYKLPDDFTGCVIAWNSNKLDSKHSGNYDYWYRSFRKSKLKPFERDISTEIYQAGNKPCKGKGPNCYFPLQSYGFRPTYGVGHQPYRVVVLSFELLHAPATVCGPKKSTNLVKNKCVNFNFNGLTGTGVLTKSNKKFLPFQQFGRDIVDTTDAVRDPQTLEILDITPCSFGGVSVITPGTNTSNQVAVLYQGVNCTEVSVAIHADQLTPTWRVYSTGSNVFQTRAGCLIGAEYVNNSYECDIPIGAGVCASYQTQTKSRQQAQSVASQSIIAYTMSLGAENSVAYSNNSIAIPTNFTISVTTEILPVSMTKTSVDCTMYICGDSTECSNLLLQYGSFCTQLKRALTGIAVEQDKNTQEVFAQVKQIYKTPPIKYFGGFNFSQILPDPSKPSKRSFIEDLLFNKVTLADAGFIKQYGDCLGDIAARDLICAQKFNGLTVLPPLLTDEMIAQYTSALLAGTITSGWTFGAGAALQIPFAMQMAYRFNGIGVTQNVLYENQKLIANQFNSAIGKIQDSLFSTASALGKLQDVVNHNAQALNTLVKQLSSKFGAISSVLNDILSRLDPPEAEVQIDRLITGRLQSLQTYVTQQLIRAAEIRASANLAATKMSECVLGQSKRVDFCGKGYHLMSFPQSAPHGVVFLHVTYVPAQEKNFTTAPAICHDGKAHFPREGVFVSNGTHWFVTQRNFYEPQIITTDNTFVSGNCDVVIGIVNNTVYDPLQLELDSFKEELDKYFKNHTSPDVDLGDISGINASVVNIQKEIDRLNEVAKNLNESLIDLQELGKYEQYIKWPWYIWLGFIAGLIAIVMVTIMLCCMTSCCSCLKGCCSCGSCCKFDEDDSEPVLKGVKLHYT
